(19) United States
(12) Patent Application Publication
(10) Pub. No.: US 2026/0078381 A1
(43) Pub. Date: Mar. 19, 2026

(54) Methods for Directing Lipid Nanoparticles in Vivo

(71) Applicant: Vertex Pharmaceuticals Incorporated, Boston, MA (US)

(72) Inventors: Gregoriy Aleksandrovich Dokshin, Boston, MA (US); Souvik Biswas, Stow, MA (US)

(73) Assignee: Vertex Pharmaceuticals Incorporated, Boston, MA (US)

(21) Appl. No.: 19/400,453

(22) Filed: Nov. 25, 2025

Related U.S. Application Data
(63) Continuation of application No. PCT/US24/31121, filed on May 24, 2024.
(60) Provisional application No. 63/469,156, filed on May 26, 2023.

(51) Int. Cl. C12N 15/113

(52) U.S. Cl. CPC C12N 15/1138; C12N 2310/14; C12N 2310/351; C12N 2310/3515

(57) ABSTRACT

Compositions and methods for enhancing payload-based gene therapy by increasing the percentage of payload delivered to a non-liver target in a subject by blocking binding of LDL to LDL receptors (LDLR) in the liver, and then administering a payload-based therapy targeting a non-liver tissue.

[0001] This application is a continuation of International Application No. PCT/US2024/031121, filed May 24, 2024, which claims the benefit of priority to U.S. Provisional Application No. 63/469,156, filed May 26, 2023, each of which is incorporated herein by reference in its entirety.

[0002] The application contains a Sequence Listing which has been submitted electronically in .XML format and is hereby incorporated by reference in its entirety. Said .XML copy, created on May 22, 2024, is named “01245-0041-00PCT.xml” and is 15,986,166 bytes in size. The sequence listing contained in this .XML file is part of the specification and is hereby incorporated by reference herein in its entirety.

### INTRODUCTION AND SUMMARY

[0003] Genetic modification as a therapeutic is becoming more common as pharmaceutically acceptable compositions such as small interfering RNA (siRNA), messenger RNA (mRNA), antisense oligonucleotides (ASOs), and CRISPR-Cas systems are successfully implemented in human subjects. However, such molecules and systems typically require the use of a delivery system to shield the therapeutic from in vivo degradation. A current problem with the current delivery systems is their inherent tropism for unwanted in vivo targets, such as, for example, the liver.

[0004] Adeno-associated viruses (AAV) vectors have been a leading candidate for in vivo gene therapy because of their broad tissue tropism, non-pathogenic nature and low immunogenicity. Currently twelve AAV serotypes and over 100 variants have been identified in human and nonhuman primate populations. Gene therapy vectors using AAV in vivo can infect both dividing and quiescent cells and persist in an extrachromosomal state without integrating into the genome of the host cell. These features make AAV an attractive candidate for use as delivery systems. However, AAV vectors are limited by several factors, including their small packaging size. Moreover, current limitations of using AAVs for gene transfer include potential safety concerns, including possible off-target toxicity. Following administration, in addition to localized and targeted delivery, most serotypes of AAV may also achieve off-target gene transfer, which can result in transduction and expression of the gene of interest in unwanted cells or tissues such as, for example, the liver. When AAV vectors reach the bloodstream, the circulatory system carries the vectors to the whole body, including to the liver, skeletal and cardiac muscles, pancreas and adrenal glands. While different AAV serotypes can have distinct tissue distribution patterns after administration, the liver is the most common organ harboring a large amount of mis-targeted AAV vectors. A recent biodistribution animal study found that, despite direct cerebrospinal fluid administration, biodistribution of vector DNA and green fluorescent protein (GFP) expression was widespread. See Meseck et al., doi.org/10.1101/2021.11.28.470258, BioRxiv.org (posted Nov. 28, 2021). In a portion of that study, the transduction and expression of scAAV9-CB-GFP in the CNS and peripheral tissues following a single intrathecal infusion into the cerebrospinal fluid was assessed. Vector DNA and GFP expression was found to be the greatest in the spinal cord, dorsal root ganglia, and systemic tissue (e.g., liver) with lower concentrations in many brain regions. Recently in 2020-2021, a gene therapy clinical trial using AAV gene therapy was paused due in part to deaths of subjects who developed complications from liver failure. See NCT03199469 (using an AAV serotype 8 vector). Thus, there exists a need in the art to reduce hepatotoxicity from delivery of genetic drugs via AAVs.

[0005] Non-viral delivery systems, including lipid nanoparticles (LNPs) and lipoplexes, provide an attractive and promising alternative to AAVs for genetic drug delivery in vivo. Specifically, LNPs are ideal candidates for at least the reason that LNPs provide for efficient biocompatibility, delivery of oligonucleotides into target cells, structural flexibility, rapid elimination after the target function is performed, low toxicity and immunity, and ease of large-scale preparation. However, LNPs are known to have some of the same disadvantages of AAV delivery systems, in particular, in off-target delivery to non-desired tissues, such as, for example, the liver. See, e.g., Dilliard, S A and Siegward, D J, 2022, Nature Biomedical Engineering, 6:106-107.

[0006] The present invention, in part, seeks to improve genetic therapies by blocking or reducing the off-target effects of delivery vehicles to the liver. For example, by knocking down or blocking low-density lipoprotein (LDL) binding to a low-density lipoprotein receptor (LDLR) using an agent (for example, an siRNA or anti-sense oligonucleotide), as a pre-conditioning therapy prior to or concurrently with receiving a therapeutic “payload” encapsulated or associated with an LNP, or lipoplex, one can block or reduce off-target liver delivery and toxicity. Because RNAi-based pre-conditioning can be administered prior to the LNP or lipoplex, carrying a therapeutic payload, and can later be cleared from the body, it can effectively and temporarily block LDL binding to LDLR in the liver, thereby enhancing the tropism of a payload to the intended non-liver target, without long term effects. The present compositions and methods can be used as a platform to enhance the tropism and thus efficacy and safety of gene therapies.

[0007] Accordingly, the following non-limiting embodiments are provided:
[0008] Embodiment 1 is a composition comprising an agent that blocks low-density lipoprotein (LDL) binding to a low-density lipoprotein receptor (LDLR) and a delivery molecule, wherein the delivery molecule is capable of delivering the agent to the liver.
[0009] Embodiment 2 is the composition of embodiment 1, further comprising a payload.
[0010] Embodiment 3 is the composition of embodiment 2, wherein the payload comprises a therapeutic agent.
[0011] Embodiment 4 is the composition of embodiment 2 or 3, wherein the payload comprises a component of a CRISPR/Cas system or a nucleic acid encoding one or more component of a CRISPR/Cas system, a biologic, or a small molecule, optionally wherein the component of a CRISPR/Cas system comprises a nucleic acid encoding one or more guide RNAs, one or more scaffolds, and/or one or more endonucleases.
[0012] Embodiment 5 is the composition of any one of embodiments 2-4, further comprising a lipid nanoparticle (LNP) or lipoplex, wherein the LNP or lipoplex encapsulates the payload.
[0013] Embodiment 6 is the composition of any one of embodiments 1-5, wherein the delivery molecule comprises a lipid nanoparticle (LNP) or lipoplex.
[0014] Embodiment 7 is the composition of any one of embodiments 1-5, wherein the delivery molecule comprises one or more of the following: lactose, galactose, N-acetylgalactosamine (GalNAc), galactosamine, N-formylgalactosamine, N-acetylgalactosamine, N-propionylgalactosamine, N-butanoylgalactosamine, N-isobutanoyl-galactosamine, and cholesterol, or a derivative thereof.
[0015] Embodiment 8 is the composition of embodiment 7, wherein the delivery molecule comprises N-acetylgalactosamine (GalNAc).
[0016] Embodiment 9 is the composition of any one of embodiments 1-8, wherein the agent comprises an RNAi.
[0017] Embodiment 10 is the composition of embodiment 9, wherein the RNAi is a small-interfering RNA (siRNA), an antisense oligonucleotide (ASO), microRNA (miRNA), double-stranded RNA (dsRNA), short hairpin RNA (shRNA) or an expression cassette encoding an RNA.
[0018] Embodiment 11 is the composition of embodiment 9, wherein the agent comprises a siRNA.
[0019] Embodiment 12 is the composition of embodiment 11, wherein the siRNA binds to a nucleic acid comprising the nucleotide sequence of any one of SEQ ID NOs: 350-352, or the reverse complement thereof.
[0020] Embodiment 13 is the composition of embodiment 11, wherein the siRNA comprises at least 13, at least 14, at least 15, at least 16, at least 17, at least 18, at least 19, at least 20, or at least 21 consecutive nucleic acids of any one of the nucleic acid sequences in Table 3A or 3B.
[0021] Embodiment 14 is the composition of embodiment 11, wherein the siRNA is at least 80%, at least 85%, at least 90%, or at least 95% identical to any one of the nucleic acid sequences in Table 3A or 3B.
[0022] Embodiment 15 is the composition of embodiment 11, wherein the siRNA comprises at least 13, at least 14, at least 15, at least 16, at least 17, at least 18, at least 19, at least 20, or at least 21 consecutive amino acids of an amino acid sequence selected from SEQ ID NOs: 4300-4309.
[0023] Embodiment 16 is the composition of embodiment 11, wherein the siRNA is at least 80%, at least 85%, at least 90%, or at least 95% identical to an amino acid sequence selected from SEQ ID NOs: 4300-4309.
[0024] Embodiment 17 is the composition of embodiment 12, wherein the agent comprises an antisense oligonucleotide (ASO).
[0025] Embodiment 18 is the composition of any one of embodiments 1-17, wherein the LDLR comprises an amino acid sequence that is at least 85%, 90%, 91%, 92%, 93%, 94%, 95%, 96%, 97%, 98%, 99% or 100% identical to any one of the sequences of SEQ ID NOs: 353-355.
[0026] Embodiment 19 is the composition of embodiment 4, wherein the component of the CRISPR/Cas system comprises a nucleic acid encoding one or more guide RNAs and a Cas9, wherein the nucleic acid molecule comprises:
   [0027] a. a first nucleic acid encoding one or more guide RNAs selected from any one of SEQ ID NOs: 1-35, 1000-1078, or 3000-3069 and a second nucleic acid encoding a Staphylococcus aureus Cas9 (SaCas9); or
   [0028] b. a first nucleic acid encoding one or more guide RNAs selected from any one of SEQ ID NOs: 100-225, 2000-2116, or 4000-4251 and a second nucleic acid encoding a Staphylococcus lugdunensis (SluCas9); or
   [0029] c. a first nucleic acid encoding one or more guide RNAs comprising at least 20 contiguous nucleotides of a guide RNA selected from any one of SEQ ID NOs: 1-35, 1000-1078, or 3000-3069 and a second nucleic acid encoding a Staphylococcus aureus Cas9 (SaCas9); or
   [0030] d. a first nucleic acid encoding one or more guide RNAs comprising at least 20 contiguous nucleotides of a guide RNA selected from any one of SEQ ID NOs: 100-225, 2000-2116, or 4000-4251 and a second nucleic acid encoding a Staphylococcus lugdunensis (SluCas9); or
   [0031] e. a first nucleic acid encoding one or more guide RNAs that is at least 90% identical to any one of SEQ ID NOs: 1-35, 1000-1078, or 3000-3069 and a second nucleic acid encoding a Staphylococcus aureus Cas9 (SaCas9); or
   [0032] f. a first nucleic acid encoding one or more guide RNAs that is at least 90% identical to any one of SEQ ID NOs: 100-225, 2000-2116, or 4000-4251 and a second nucleic acid encoding a Staphylococcus lugdunensis (SluCas9); or
   [0033] g. a first nucleic acid encoding a pair of guide RNAs comprising a first and second guide RNA selected from any one of the following pairs of guide RNAs: SEQ ID NOs: 1020 and 23; 1023 and 23; 1023 and 1037; 1024 and 1055; 1025 and 23; 1025 and 1055; 1026 and 23; 1028 and 1055; 1029 and 1055; 1029 and 1037; 1031 and 1037; 1032 and 1037; 101029 and 1027; 1037 and 1048; 1037 and 1051; 1037 and 1053; 20 and 23; 1038 and 23; 21 and 23; 1040 and 23; 1042 and 1037; 1043 and 1037; 1044 and 1037; 1045 and 1037; 1046 and 1037; 24 and 1037; 1047 and 1055; or 1055 and 1022; and a second nucleic acid encoding a Staphylococcus aureus Cas9 (SaCas9); or
   [0034] h. a first nucleic acid encoding a pair of guide RNAs comprising a first and second guide RNA selected from any one of the following pairs of guide RNAs: SEQ ID NOs: 170 and 179; 172 and 179; 179 and 183; 179 and 185; 179 and 187; 179 and 188; 179 and 189; 179 and 193; 179 and 195; 179 and 196; 179 and 197; 200 and 174; or 200 and 176; and a second nucleic acid encoding a Staphylococcus lugdunensis (SluCas9);
   [0035] i. a first nucleic acid encoding a pair of guide RNAs comprising a first and second guide RNA selected from any one of the following pairs of guide RNAs: SEQ ID NOs: 117 and 121; 117 and 122; 120 and 121; 120 and 123; 120 and 124; 120 and 125; 122 and 126; 122 and 123; 122 and 124; 122 and 125; or 122 and 126; and a second nucleic acid encoding a Staphylococcus lugdunensis (SluCas9); for targeting exon 44;
   [0036] j. a first nucleic acid encoding a pair of guide RNAs comprising a first and second guide RNA selected from any one of the following pairs of guide RNAs: 155 and 156; 155 and 158; 155 and 162; 155 and 163; 162 and 157; 162 and 159; 162 and 164; 162 and 166; or 162 and 167; and a second nucleic acid encoding a Staphylococcus lugdunensis (SluCas9); for targeting exon 50;
   [0037] k. a first nucleic acid encoding a pair of guide RNAs comprising a first and second guide RNA selected from any one of the following pairs of guide RNAs: SEQ ID NOs: 211 and 223; 211 and 225; 214 and 224; 216 and 223; 216 and 225; 220 and 224; 204 and 223; 223 and 224; or 204 and 225; and a second nucleic acid encoding a Staphylococcus lugdunensis (SluCas9); for targeting exon 53;
   [0038] l. a first nucleic acid encoding a pair of guide RNAs comprising a first and second guide RNA selected from any one of the following pairs of guide RNAs: SEQ ID NOs: 1068 and 32; 1069 and 32; 1070 and 1075; 1071 and 32; 29 and 1075; 1072 and 27; 1072 and 28; 1072 and 32; 1072 and 33; 1073 and 1076; 1073 and 35; 221 and 1077; 1074 and 27; 1074 and 28; 1074 and 33; 32 and 1077; 1075 and 1076; 1075 and 35; 1076 and 26; or 35 and 26; and a second nucleic acid encoding a Staphylococcus aureus Cas9 (SaCas9); for targeting exon 53;
   [0039] m. a first nucleic acid encoding a pair of guide RNAs comprising a first and second guide RNA selected from any one of the following pairs of guide RNAs: SEQ ID NOs: 148 and 134; 149 and 135; 150 and 135; 131 and 136; 151 and 136; 139 and 131; 139 and 151; 140 and 131; 140 and 151; 141 and 148; 144 and 149; 144 and 150; 145 and 131; 145 and 151; 146 and 148; 134 and 148; 135 and 149; 135 and 150; 136 and 131; 136 and 151; 131 and 139; 151 and 139; 131 and 140; 151 and 140; 148 and 141; 149 and 144; 150 and 144; 131 and 145; 151 and 145; and 148 and 146; and a second nucleic acid encoding a Staphylococcus lugdunensis (SluCas9); or
   [0040] n. a first nucleic acid encoding a pair of guide RNAs comprising a first and second guide RNA selected from any one of the following pairs of guide RNAs: SEQ ID NOs: 10 and 15; 10 and 16; 12 and 16; 1001 and 1005; 1001 and 15; 1001 and 16; 1003 and 1005; 16 and 1003; 12 and 1010; 12 and 1012; 12 and 1013; 10 and 1016; 1017 and 1005; 1017 and 16; 1018 and 16; 15 and 10; 16 and 10; 16 and 12; 1005 and 1001; 15 and 1001; 16 and 1001; 1005 and 1003; 1003 and 16; 1010 and 12; 1012 and 12; 1013 and 12; 1016 and 10; 1005 and 1017; 16 and 1017; and 16 and 1018; and a second nucleic acid encoding a Staphylococcus aureus Cas9 (SaCas9).
[0041] Embodiment 20 is a method comprising (a) administering to a subject in need thereof an agent that blocks LDL binding to a low-density lipoprotein receptor (LDLR) and concurrently or sequentially (b) administering an LNP or lipoplex comprising a payload to the subject, wherein the agent reduces off-target delivery of the LNP or lipoplex to the liver.
[0042] Embodiment 21 is a method of increasing the percentage of payload delivered to a non-liver target in a subject, comprising (a) a pre-conditioning step comprising administering to the subject a composition comprising an agent that blocks LDL binding to a low-density lipoprotein receptor (LDLR) in the liver, and then (b) administering an LNP or lipoplex and a payload to the subject.
[0043] Embodiment 22 is the method of any one of embodiments 20-21, wherein step (a) comprises administering to the subject the composition of any one of embodiments 1, and 6-18.
[0044] Embodiment 23 is a method of decreasing liver tropism of a payload administered in an LNP or lipoplex in a subject comprising (a) administering to the subject a composition of any one of embodiments 1, and 6-18, and then (b) administering an LNP or lipoplex and a payload to the subject.
[0045] Embodiment 24 is the method of any of embodiments 20-23, wherein administering to the subject a composition comprising an agent that blocks LDL binding to a low-density lipoprotein receptor (LDLR) in the liver temporarily blocks the delivery molecule from interacting with the LDLR in the liver.
[0046] Embodiment 25 is the method of any of embodiments 20-24, wherein administering to the subject the composition and/or agent that blocks LDL binding to a low-density lipoprotein receptor (LDLR) in the liver occurs about 2 days, about 3 days, about 4 days, about 5 days, about 6 days, about 7 days, about 8 days, about 9 days, about 10 days, about 11 days, about 12 days, about 13 days, about 14 days, about 15 days, about 16, days, about 17 days, about 18 days, about 19 days, about 20 days, or about 21 days prior to administering the LNP or lipoplex, and payload.
[0047] Embodiment 26 is the method of any one of embodiments 20-24, wherein administering to the subject the composition and/or agent that blocks LDL binding to a low-density lipoprotein receptor (LDLR) in the liver occurs about 1 day, about 2 days, about 3 days, about 4 days, about 5 days, about 6 days, about 7 days prior to administering the LNP or lipoplex and payload.
[0048] Embodiment 27 is the method of any of embodiments 20-24, wherein administering to the subject the composition and/or agent that blocks LDL binding to a low-density lipoprotein receptor (LDLR) in the liver occurs about 8 days, about 9 days, about 10 days, about 11 days, about 12 days, about 13 days, or about 14 days prior to administering the LNP or lipoplex and payload.
[0049] Embodiment 28 is the method of any of embodiments 20-24 wherein administering to the subject the composition of any one of embodiments 1, and 6-18 immediately precedes administering the LNP or lipoplex and payload.
[0050] Embodiment 29 is the method of any of embodiments 20-24, wherein the composition of any one of embodiments 1, and 6-18 and the LNP or lipoplex and payload are co-administered.
[0051] Embodiment 30 is the method of any of embodiments 20-24, wherein the delivery molecule is a lipid nanoparticle (LNP).
[0052] Embodiment 31 is the method of any of embodiments 20-24, wherein the payload is a component of a CRISPR/Cas system or a nucleic acid encoding one or more components thereof, a biologic, or a small molecule, optionally wherein the component of a CRISPR/Cas system comprises a nucleic acid encoding one or more guide RNAs, one or more scaffolds, and/or one or more endonucleases.
[0053] Embodiment 32 is the method of embodiment 31, wherein the component of a CRISPR/Cas system comprises a nucleic acid encoding one or more guide RNAs and a Cas9, wherein the nucleic acid molecule comprises:
   [0054] a. a first nucleic acid encoding one or more guide RNAs selected from any one of SEQ ID NOs: 1-35, 1000-1078, or 3000-3069 and a second nucleic acid encoding a Staphylococcus aureus Cas9 (SaCas9); or
   [0055] b. a first nucleic acid encoding one or more guide RNAs selected from any one of SEQ ID NOs: 100-225, 2000-2116, or 4000-4251 and a second nucleic acid encoding a Staphylococcus lugdunensis (SluCas9); or
   [0056] c. a first nucleic acid encoding one or more guide RNAs comprising at least 20 contiguous nucleotides of a guide RNA selected from any one of SEQ ID NOs: 1-35, 1000-1078, or 3000-3069 and a second nucleic acid encoding a Staphylococcus aureus Cas9 (SaCas9); or
   [0057] d. a first nucleic acid encoding one or more guide RNAs comprising at least 20 contiguous nucleotides of a guide RNA selected from any one of SEQ ID NOs: 100-225, 2000-2116, or 4000-4251 and a second nucleic acid encoding a Staphylococcus lugdunensis (SluCas9); or
   [0058] e. a first nucleic acid encoding one or more guide RNAs that is at least 90% identical to any one of SEQ ID NOs: 1-35, 1000-1078, or 3000-3069 and a second nucleic acid encoding a Staphylococcus aureus Cas9 (SaCas9); or
   [0059] f. a first nucleic acid encoding one or more guide RNAs that is at least 90% identical to any one of SEQ ID NOs: 100-225, 2000-2116, or 4000-4251 and a second nucleic acid encoding a Staphylococcus lugdunensis (SluCas9); or
   [0060] g. a first nucleic acid encoding a pair of guide RNAs comprising a first and second guide RNA selected from any one of the following pairs of guide RNAs: SEQ ID NOs: 1020 and 23; 1023 and 23; 1023 and 1037; 1024 and 1055; 1025 and 23; 1025 and 1055; 1026 and 23; 1028 and 1055; 1029 and 1055; 1029 and 1037; 1031 and 1037; 1032 and 1037; 101029 and 1027; 1037 and 1048; 1037 and 1051; 1037 and 1053; 20 and 23; 1038 and 23; 21 and 23; 1040 and 23; 1042 and 1037; 1043 and 1037; 1044 and 1037; 1045 and 1037; 1046 and 1037; 24 and 1037; 1047 and 1055; or 1055 and 1022; and a second nucleic acid encoding a Staphylococcus aureus Cas9 (SaCas9); or
   [0061] h. a first nucleic acid encoding a pair of guide RNAs comprising a first and second guide RNA selected from any one of the following pairs of guide RNAs: SEQ ID NOs: 170 and 179; 172 and 179; 179 and 183; 179 and 185; 179 and 187; 179 and 188; 179 and 189; 179 and 193; 179 and 195; 179 and 196; 179 and 197; 200 and 174; or 200 and 176; and a second nucleic acid encoding a Staphylococcus lugdunensis (SluCas9);
   [0062] i. a first nucleic acid encoding a pair of guide RNAs comprising a first and second guide RNA selected from any one of the following pairs of guide RNAs: SEQ ID NOs: 117 and 121; 117 and 122; 120 and 121; 120 and 123; 120 and 124; 120 and 125; 122 and 126; 122 and 123; 122 and 124; 122 and 125; or 122 and 126; and a second nucleic acid encoding a Staphylococcus lugdunensis (SluCas9); for targeting exon 44;
   [0063] j. a first nucleic acid encoding a pair of guide RNAs comprising a first and second guide RNA selected from any one of the following pairs of guide RNAs: 155 and 156; 155 and 158; 155 and 162; 155 and 163; 162 and 157; 162 and 159; 162 and 164; 162 and 166; or 162 and 167; and a second nucleic acid encoding a Staphylococcus lugdunensis (SluCas9); for targeting exon 50;
   [0064] k. a first nucleic acid encoding a pair of guide RNAs comprising a first and second guide RNA selected from any one of the following pairs of guide RNAs: SEQ ID NOs: 211 and 223; 211 and 225; 214 and 224; 216 and 223; 216 and 225; 220 and 224; 204 and 223; 223 and 224; or 204 and 225; and a second nucleic acid encoding a Staphylococcus lugdunensis (SluCas9); for targeting exon 53;
   [0065] l. a first nucleic acid encoding a pair of guide RNAs comprising a first and second guide RNA selected from any one of the following pairs of guide RNAs: SEQ ID NOs: 1068 and 32; 1069 and 32; 1070 and 1075; 1071 and 32; 29 and 1075; 1072 and 27; 1072 and 28; 1072 and 32; 1072 and 33; 1073 and 1076; 1073 and 35; 221 and 1077; 1074 and 27; 1074 and 28; 1074 and 33; 32 and 1077; 1075 and 1076; 1075 and 35; 1076 and 26; or 35 and 26; and a second nucleic acid encoding a Staphylococcus aureus Cas9 (SaCas9); for targeting exon 53;
   [0066] m. a first nucleic acid encoding a pair of guide RNAs comprising a first and second guide RNA selected from any one of the following pairs of guide RNAs: SEQ ID NOs: 148 and 134; 149 and 135; 150 and 135; 131 and 136; 151 and 136; 139 and 131; 139 and 151; 140 and 131; 140 and 151; 141 and 148; 144 and 149; 144 and 150; 145 and 131; 145 and 151; 146 and 148; 134 and 148; 135 and 149; 135 and 150; 136 and 131; 136 and 151; 131 and 139; 151 and 139; 131 and 140; 151 and 140; 148 and 141; 149 and 144; 150 and 144; 131 and 145; 151 and 145; and 148 and 146; and a second nucleic acid encoding a Staphylococcus lugdunensis (SluCas9); or
   [0067] n. a first nucleic acid encoding a pair of guide RNAs comprising a first and second guide RNA selected from any one of the following pairs of guide RNAs: SEQ ID NOs: 10 and 15; 10 and 16; 12 and 16; 1001 and 1005; 1001 and 15; 1001 and 16; 1003 and 1005; 16 and 1003; 12 and 1010; 12 and 1012; 12 and 1013; 10 and 1016; 1017 and 1005; 1017 and 16; 1018 and 16; 15 and 10; 16 and 10; 16 and 12; 1005 and 1001; 15 and 1001; 16 and 1001; 1005 and 1003; 1003 and 16; 1010 and 12; 1012 and 12; 1013 and 12; 1016 and 10; 1005 and 1017; 16 and 1017; and 16 and 1018; and a second nucleic acid encoding a Staphylococcus aureus Cas9 (SaCas9).
[0068] Embodiment 33 is the method of any one of embodiments 20-32, wherein the payload is encapsulated within a lipid nanoparticle (LNP).
[0069] Embodiment 34 is the method of any of embodiments 20-33, wherein the method comprises co-administering other drugs that facilitate increased uptake of the agent in the liver.
[0070] Embodiment 35 is the method of any of any of embodiments 20-34 wherein the blocking of LDL to a low-density lipoprotein receptor (LDLR) in the liver in step (a) is not temporary.
[0071] Embodiment 36 is the method of any one of embodiments 20-35, wherein the payload is within an LNP, and the LNP targets the brain; spinal cord; eye; retina; bone; cardiac muscle, skeletal muscle, smooth muscle; lung; pancreas; heart; and/or kidney.
[0072] Embodiment 37 is the method of any one of embodiments 20-36, wherein administering the composition in step (a) increases the percentage of payload delivered to a non-liver target.
[0073] Embodiment 38 is the method of any one of embodiments 20-37, wherein the method results in at least a 10%, 30%, 50%, 75%, 100%, 125%, 150%, 200%, 250%, 300%, 350%, 400%, 450%, 500%, 600%, 700%, 800%, 900%, or 1000% increase of payload in a non-liver target as compared to the payload in the corresponding tissue of a control subject that received the payload but did not receive the agent that blocks LDL binding to a low-density lipoprotein receptor (LDLR) in the liver.
[0074] Embodiment 39 is the method of embodiment 38, wherein the method results in at least a 10%, 30%, 50%, 75%, 100%, 125%, 150%, 200%, 250%, 300%, 350%, 400%, 450%, 500%, 600%, 700%, 800%, 900%, or 1000% increase of payload in skeletal muscle as compared to the payload in the corresponding muscle of a control subject that received the payload but did not receive the agent that blocks LDL binding to a low-density lipoprotein receptor (LDLR) in the liver.
[0075] Embodiment 40 is the method of any one of embodiments 20-39, wherein the agent comprises an RNAi.
[0076] Embodiment 41 is the method of embodiment 40, wherein the RNAi is a small-interfering RNA (siRNA), an antisense oligonucleotide (ASO), microRNA (miRNA), double-stranded RNA (dsRNA), short hairpin RNA (shRNA) or an expression cassette encoding an RNA.
[0077] Embodiment 42 is the method of embodiment 41, wherein the agent comprises a siRNA.
[0078] Embodiment 43 is the method of embodiment 42, wherein the siRNA binds to a nucleic acid comprising the nucleotide sequence of any one of SEQ ID NOs: 350-352, or the reverse complement thereof.
[0079] Embodiment 44 is the method of embodiment 42, wherein the siRNA comprises at least 13, at least 14, at least 15, at least 16, at least 17, at least 18, at least 19, at least 20, or at least 21 consecutive nucleic acids of any one of the nucleic acid sequences in Table 3A or 3B.
[0080] Embodiment 45 is the method of embodiment 42, wherein the siRNA is at least 80%, at least 85%, at least 90%, or at least 95% identical to any one of the nucleic acid sequences in Table 3A or 3B.
[0081] Embodiment 46 is the method of embodiment 42, wherein the siRNA comprises at least 13, at least 14, at least 15, at least 16, at least 17, at least 18, at least 19, at least 20, or at least 21 consecutive amino acids of an amino acid sequence selected from SEQ ID NOs: 4300-4309.
[0082] Embodiment 47 is the method of embodiment 42, wherein the siRNA is at least 80%, at least 85%, at least 90%, or at least 95% identical to an amino acid sequence selected from SEQ ID NOs: 4300-4309.
[0083] Embodiment 48 is the method of embodiment 42, wherein the agent comprises an antisense oligonucleotide (ASO).
[0084] Embodiment 49 is the method of any of embodiments 20-48, wherein the subject is a human subject.
[0085] Embodiment 50 is the method of any one of embodiments 20-49, wherein the agent is administered intravenously or subcutaneously.
[0086] Embodiment 51 is a composition comprising a siRNA comprising a nucleotide sequence selected from SEQ ID NOs: 4300-15629.
[0087] Embodiment 52 is the composition of embodiment 51, wherein the siRNA comprises a nucleotide sequence selected from any one of SEQ ID NOs: 4300-4309.

### BRIEF DESCRIPTION OF THE DRAWINGS

[0088] FIGS. 1A-J show knockdown of LDLR mRNA by 10 different siRNAs in Hepa1-6 cells. The plots show 10-point dose response for each of the 10 siRNAs evaluated. FIG. 1K provides siRNA sequence identity, species conservation and potency values calculated from dose-response curves.

[0089] FIG. 2 shows knockdown of LDLR mRNA with different siRNA in Hepa1-6 cells. The plot trace shows fold change in LDLR mRNA levels relative to untreated samples, as measured by qPCR 48 hours after treatment with 2.5 nM (left column of modality), 50 nM siRNA (right column corresponding to treatment with one modality). The dashed black line indicates 50% mRNA expression level. The bar height represents the mean value of the technical replicates and error bars correspond to group standard deviation. Positive control is commercially available siRNA targeting LDLR (Invitrogen AM16708-“Invt”). All siRNa were transfected to cells using standard RNAi Max protocol. Negative control: non-targeting siRNA (51-01-19-08, Integrated DNA Technologies) used as a negative control. Not treated: samples were not treated with lipofectamine.

[0090] FIG. 3 shows a simplified graphical representation of the in vivo study design and analysis to examine LDLR protein knockdown kinetics.

[0091] FIG. 4 shows in vivo data for the LNP siRNA results in sustainable knockdown of LDLR mRNA through day 7.

[0092] FIGS. 5A-B show in vivo data wherein, compared to PBS, siRNA-LNP results in sustainable knockdown of LDLR protein through day 7. FIG. 5A shows representative image of Jess blot for selected samples from Day 1 and LDLR recombinant protein. FIG. 5B shows normalized LDLR protein expression level from mouse liver at each timepoint. Samples were normalized to mean value of PBS treated animals at a given timepoint.

[0093] FIG. 6 shows in vivo data, wherein LDL-c (low density lipoprotein cholesterol) acts as biomarker of LDLR knockdown. Animals dosed with LDLR-targeting articles show an increase in LDL-c levels. Each dot point on the graph represents the LDL-c level of a single animal. The bar height represents the mean result of the group, and error bars represent standard deviation of the group. Control PBS contains results from IV and SC ROA. The results from one animal were excluded due to a failed experiment.

[0094] FIG. 7 is a simplified graphical representation of an in vivo study design and analysis to examine LDLR-LNP doses, wherein mice will be dosed with a range of liver-tropic LDLR targeting siRNA-LNPs amounts and tissues will be harvested 4 to 48h after dosing to evaluate LDLR protein levels by western blot. The figure corresponds to the study in Example 3.

[0095] FIG. 8 is a simplified graphical representation of an in vivo study design and analysis to examine LDLR protein knockdown kinetics from optimal dose corresponding to the study in Example 4.

[0096] FIG. 9 is a simplified graphical representation of an in vivo proof of concept study design and analysis to examine the efficiency of LNP de-targeting strategy. The study corresponds to the study in Example 5.

### DETAILED DESCRIPTION

[0097] Reference will now be made in detail to certain embodiments of the invention. While the invention is described in conjunction with the illustrated embodiments, it will be understood that they are not intended to limit the invention to those embodiments. On the contrary, the invention is intended to cover all alternatives, modifications, and equivalents, which may be included within the invention as defined by the appended claims and included embodiments.

[0098] Before describing the present teachings in detail, it is to be understood that the disclosure is not limited to specific compositions or process steps, as such may vary. It should be noted that, as used in this specification and the appended claims, the singular form “a,” “an,” and “the” include plural references unless the context clearly dictates otherwise. Thus, for example, reference to “a guide” includes a plurality of guides and reference to “a cell” includes a plurality of cells and the like.

[0099] Numeric ranges are inclusive of the numbers defining the range. Measured and measurable values are understood to be approximate, taking into account significant digits and the error associated with the measurement. Also, the use of “comprise”, “comprises”, “comprising”, “contain”, “contains”, “containing”, “include”, “includes”, and “including” are not intended to be limiting. It is to be understood that both the foregoing general description and detailed description are exemplary and explanatory only and are not restrictive of the teachings.

[0100] Unless specifically noted in the specification, embodiments in the specification that recite “comprising” various components are also contemplated as “consisting of” or “consisting essentially of” the recited components; embodiments in the specification that recite “consisting of” various components are also contemplated as “comprising” or “consisting essentially of” the recited components; and embodiments in the specification that recite “consisting essentially of” various components are also contemplated as “consisting of” or “comprising” the recited components (this interchangeability does not apply to the use of these terms in the claims). The term “or” is used in an inclusive sense, i.e., equivalent to “and/or,” unless the context clearly indicates otherwise.

[0101] The section headings used herein are for organizational purposes only and are not to be construed as limiting the desired subject matter in any way. In the event that any material incorporated by reference contradicts any term defined in this specification or any other express content of this specification, this specification controls. While the present teachings are described in conjunction with various embodiments, it is not intended that the present teachings be limited to such embodiments. On the contrary, the present teachings encompass various alternatives, modifications, and equivalents, as will be appreciated by those of skill in the art.

### I. Definitions

[0102] Unless stated otherwise, the following terms and phrases as used herein are intended to have the following meanings:

[0103] “Polynucleotide,” “nucleic acid,” and “nucleic acid molecule,” are used herein to refer to a multimeric compound comprising nucleosides or nucleoside analogs which have nitrogenous heterocyclic bases or base analogs linked together along a backbone, including conventional RNA, DNA, mixed RNA-DNA, and polymers that are analogs thereof. A nucleic acid “backbone” can be made up of a variety of linkages, including one or more of sugar-phosphodiester linkages, peptide-nucleic acid bonds (“peptide nucleic acids” or PNA; PCT No. WO 95/32305), phosphorothioate linkages, methylphosphonate linkages, or combinations thereof. Sugar moieties of a nucleic acid can be ribose, deoxyribose, or similar compounds with substitutions, e.g., 2′ methoxy or 2′ halide substitutions. Nitrogenous bases can be conventional bases (A, G, C, T, U), analogs thereof (e.g., modified uridines such as 5-methoxyuridine, pseudouridine, or N1-methylpseudouridine, or others); inosine; derivatives of purines or pyrimidines (e.g., N⁴-methyl deoxyguanosine, deaza- or aza-purines, deaza- or aza-pyrimidines, pyrimidine bases with substituent groups at the 5 or 6 position (e.g., 5-methylcytosine), purine bases with a substituent at the 2, 6, or 8 positions, 2-amino-6-methylaminopurine, O⁶-methylguanine, 4-thio-pyrimidines, 4-amino-pyrimidines, 4-dimethylhydrazine-pyrimidines, and O⁴-alkyl-pyrimidines; U.S. Pat. No. 5,378,825 and PCT No. WO 93/13121). For general discussion see The Biochemistry of the Nucleic Acids 5-36, Adams et al., ed., 11^{th} ed., 1992). Nucleic acids can include one or more “abasic” residues where the backbone includes no nitrogenous base for position(s) of the polymer (U.S. Pat. No. 5,585,481). A nucleic acid can comprise only conventional RNA or DNA sugars, bases and linkages, or can include both conventional components and substitutions (e.g., conventional bases with 2′ methoxy linkages, or polymers containing both conventional bases and one or more base analogs). Nucleic acid includes “locked nucleic acid” (LNA), an analogue containing one or more LNA nucleotide monomers with a bicyclic furanose unit locked in an RNA mimicking sugar conformation, which enhance hybridization affinity toward complementary RNA and DNA sequences (Vester and Wengel, 2004, Biochemistry 43(42):13233-41). RNA and DNA have different sugar moieties and can differ by the presence of uracil or analogs thereof in RNA and thymine or analogs thereof in DNA. The disclosure provides a number of exemplary nucleotide sequences herein, and contemplates reverse complements of these nucleotide sequences, as well as RNA and/or DNA equivalents of any of these sequences. For example, an RNA equivalent of any of the DNA sequences disclosed herein would comprise uracils in place of thymines in the sequence, whereas a DNA equivalent of any of the RNA sequences disclosed herein would comprise thymines in place of uracils.

[0104] As used herein, “CRISPR” systems and “RNA-targeted endonucleases” or “Cas-nucleases” includes the type II CRISPR systems of S. pyogenes, S. aureus, and other prokaryotes (see, e.g., the list in the next paragraph), and modified (e.g., engineered or mutant) versions thereof. See, e.g., US2016/0312198 A1; US 2016/0312199 A1. In particular embodiments, the RNA-targeted endonuclease is a type II CRISPR Cas enzyme. Other examples of Cas nucleases include a Csm or Cmr complex of a type III CRISPR system or the Cas10, Csm1, or Cmr2 subunit thereof; and a Cascade complex of a type I CRISPR system, or the Cas3 subunit thereof. In some embodiments, the Cas nuclease may be from a Type-IIA, Type-IIB, or Type-IIC system. For discussion of various CRISPR systems and Cas nucleases see, e.g., Makarova et al., Nat. Rev. Microbiol., 9:467-477 (2011); Makarova et al., Nat. Rev. Microbiol., 13: 722-36 (2015); Shmakov et al., Molecular Cell, 60:385-397 (2015).

[0105] Non-limiting exemplary species that the Cas nuclease can be derived from include Streptococcus pyogenes, Streptococcus thermophilus, Streptococcus sp., Staphylococcus aureus, Listeria innocua, Lactobacillus gasseri, Francisella novicida, Wolinella succinogenes, Sutterella wadsworthensis, Gammaproteobacterium, Neisseria meningitidis, Campylobacter jejuni, Pasteurella multocida, Fibrobacter succinogene, Rhodospirillum rubrum, Nocardiopsis dassonvillei, Streptomyces pristinaespiralis, Streptomyces viridochromogenes, Streptomyces viridochromogenes, Streptosporangium roseum, Streptosporangium roseum, Alicyclobacillus acidocaldarius, Bacillus pseudomycoides, Bacillus selenitireducens, Exiguobacterium sibiricum, Lactobacillus delbrueckii, Lactobacillus salivarius, Lactobacillus buchneri, Treponema denticola, Microscilla marina, Burkholderiales bacterium, Polaromonas naphthalenivorans, Polaromonas sp., Crocosphaera watsonii, Cyanothece sp., Microcystis aeruginosa, Synechococcus sp., Acetohalobium arabaticum, Ammonifex degensii, Caldicelulosiruptor becscii, Candidatus Desulforudis, Clostridium botulinum, Clostridium difficile, Finegoldia magna, Natranaerobius thermophilus, Pelotomaculum thermopropionicum, Acidithiobacillus caldus, Acidithiobacillus ferrooxidans, Allochromatium vinosum, Marinobacter sp., Nitrosococcus halophilus, Nitrosococcus watsoni, Pseudoalteromonas haloplanktis, Ktedonobacter racemifer, Methanohalobium evestigatum, Anabaena variabilis, Nodularia spumigena, Nostoc sp., Arthrospira maxima, Arthrospira platensis, Arthrospira sp., Lyngbya sp., Microcoleus chthonoplastes, Oscillatoria sp., Petrotoga mobilis, Thermosipho africanus, Streptococcus pasteurianus, Neisseria cinerea, Campylobacter lari, Parvibaculum lavamentivorans, Corynebacterium diphtheria, Acidaminococcus sp., Lachnospiraceae bacterium ND2006, and Acaryochloris marina.

[0106] “Guide RNA”, “guide RNA”, and simply “guide” are used herein interchangeably to refer to either a crRNA (also known as CRISPR RNA), or the combination of a crRNA and a trRNA (also known as tracrRNA). The crRNA and trRNA may be associated as a single RNA molecule (single guide RNA, sgRNA) or in two separate RNA molecules (dual guide RNA, dgRNA). “Guide RNA” or “guide RNA” refers to each type. The trRNA may be a naturally-occurring sequence, or a trRNA sequence with modifications or variations compared to naturally-occurring sequences. For clarity, the terms “guide RNA” or “guide” as used herein, and unless specifically stated otherwise, may refer to an RNA molecule (comprising A, C, G, and U nucleotides) or to a DNA molecule encoding such an RNA molecule (comprising A, C, G, and T nucleotides) or complementary sequences thereof. In general, in the case of a DNA nucleic acid construct encoding a guide RNA, the U residues in any of the RNA sequences described herein may be replaced with T residues, and in the case of a guide RNA construct encoded by any of the DNA sequences described herein, the T residues may be replaced with U residues.

[0107] As used herein, a “spacer sequence,” sometimes also referred to herein and in the literature as a “spacer,” “protospacer,” “guide sequence,” or “targeting sequence” refers to a sequence within a guide RNA that is complementary to a target sequence and functions to direct a guide RNA to a target sequence for cleavage by a Cas9. A guide sequence can be 24, 23, 22, 21, 20 or fewer base pairs in length, e.g., in the case of Staphylococcus lugdunensis (i.e., SluCas9) or Staphylococcus aureus (i.e., SaCas9) and related Cas9 homologs/orthologs. In preferred embodiments, a guide/spacer sequence in the case of SluCas9 or SaCas9 is at least 20 base pairs in length, or more specifically, within 20-25 base pairs in length (see, e.g., Schmidt et al., 2021, Nature Communications, “Improved CRISPR genome editing using small highly active and specific engineered RNA-guided nucleases”). Shorter or longer sequences can also be used as guides, e.g., 15-, 16-, 17-, 18-, 19-, 20-, 21-, 22-, 23-, 24-, or 25-nucleotides in length. For example, in some embodiments, the guide sequence comprises at least 17, 18, 19, 20, 21, 22, 23, 24, or 25 contiguous nucleotides of a sequence selected from SEQ ID NOs: 1-35 (for SaCas9), and 100-225 (for SluCas9). In some embodiments, the target sequence is in a gene or on a chromosome, for example, and is complementary to the guide sequence. In some embodiments, the degree of complementarity or identity between a guide sequence and its corresponding target sequence may be about 75%, 80%, 85%, 90%, 95%, 96%, 97%, 98%, 99%, or 100%. In some embodiments, the guide sequence and the target region may be 100% complementary or identical. In other embodiments, the guide sequence and the target region may contain at least one mismatch. For example, the guide sequence and the target sequence may contain 1, 2, 3, or 4 mismatches, where the total length of the target sequence is at least 17, 18, 19, 20 or more base pairs. In some embodiments, the guide sequence and the target region may contain 1-4 mismatches where the guide sequence comprises at least 17, 18, 19, 20 or more nucleotides. In some embodiments, the guide sequence and the target region may contain 1, 2, 3, or 4 mismatches where the guide sequence comprises 20 nucleotides. In some embodiments, the guide sequence and the target region do not contain any mismatches.

[0108] As used herein, the terms “about” or “approximately” means an acceptable error for a particular value as determined by one of ordinary skill in the art, which depends in part on how the value is measured or determined.

[0109] As used herein, “AAV” refers to an adeno-associated virus vector. As used herein, “AAV” refers to any AAV serotype and variant, including but not limited to an AAV1, AAV2, AAV3, AAV4, AAV5, AAV6, AAV7, AAV8, AAVrh10 (see, e.g., SEQ ID NO: 81 of U.S. Pat. No. 9,790,472, which is incorporated by reference herein in its entirety), AAVrh74 (see, e.g., SEQ ID NO: 1 of US 2015/0111955, which is incorporated by reference herein in its entirety), AAV9 vector, AAV9P vector also known as AAVMYO (see, Weinmann et al., 2020, Nature Communications, 11:5432), and Myo-AAV vectors described in Tabebordbar et al., 2021, Cell, 184:1-20 (e.g., MyoAAV 1A, 2A, 3A, 4A, 4C, or 4E), wherein the number following AAV indicates the AAV serotype. The term “AAV” can also refer to any known AAV (vector) system. In some embodiments, the AAV vector is a single-stranded AAV (ssAAV). In some embodiments, the AAV vector is a double-stranded AAV (dsAAV). Any variant of an AAV vector or serotype thereof, such as a self-complementary AAV (scAAV) vector, is encompassed within the general terms AAV vector, AAV1 vector, etc. See, e.g., McCarty et al., Gene Ther. 2001; 8:1248-54, Naso et al., BioDrugs 2017; 31:317-334, and references cited therein for detailed discussion of various AAV vectors. Structurally, AAVs are small (25 nm), single-DNA stranded non-enveloped viruses with an icosahedral capsid. As used herein, “AAV” can refer to naturally occurring or engineered AAV serotypes and recombinant AAVs (rAAVs) and variants that can differ in the composition and structure of their capsid protein have varying tropism, i.e., ability to transduce different cell types. When combined with active promoters, this tropism defines the site of gene expression.

[0110] As used herein “payload-based gene therapy” refers to the administration of a payload composition, including one or more Cas9 nucleases and one or more guide RNAs, or nucleic acids encoding one or more Cas9 nucleases and one or more guide RNAs, for gene editing comprising a tissue-specific promoter in facilitating administration of gene therapy, which can include any known gene editing system in the art. A promoter as described herein can also be “cell specific,” meaning that the particular promoter selected for the payload can direct expression of the selected transgene/nucleotide sequence of interest in a particular cell or cell type. In some embodiments, for example, the promoter is a muscle-specific promoter, including a muscle creatine kinase promoter, a desmin promoter, an MHCK7 promoter, or an SPc5-12 promoter. In some embodiments, the muscle-specific promoter is a CK8 promoter. In some embodiments, the muscle-specific promoter is a CK8e promoter. Muscle-specific promoters are described in detail, e.g., in US2004/0175727 A1; Wang et al., Expert Opin Drug Deliv. (2014) 11, 345-364; Wang et al., Gene Therapy (2008) 15, 1489-1499. In some embodiments, the tissue-specific promoter is a neuron-specific promoter, such as an enolase promoter. See, e.g., Naso et al., BioDrugs 2017; 31:317-334; Dashkoff et al., Mol Ther Methods C/in Dev. 2016; 3:16081, and references cited therein for detailed discussion of tissue-specific promoters including neuron-specific promoters. Any known promoters may be used in conjunction with the payloads to administer the gene therapy to the intended target tissues or cells. As used herein, “non-liver payload-based gene therapy” includes treating or preventing a disease or disorder using payload-based gene therapy that is not a disease or disorder of the liver.

[0111] As used herein, “low density lipoprotein receptor,” or “LDLR” or “LDL-R” or “LDL receptor” are used interchangeably to refer to LDL receptor protein. LDLR has a Uniprot Accession No. of H0YMD1. Synonyms for LDLR also include, FHC, LDLCQ2, and LDLR_HUMAN. LDLR is a protein that studies have shown is synthesized in the endoplasmic reticulum (ER), where it folds and is partially glycosylated. Next, studies have shown that LDLR is further glycosylated in the Golgi apparatus, rendering the mature protein. The LDLR is organized in five functionally distinct domains: the N-terminal ligand-binding domain, the epidermal growth factor (EGF)-precursor homology domain, the O-linked sugars containing domain, the trans-membrane and the C-terminal cytosolic domain.

[0112] As used herein, “blocks LDL binding to an LDLR” or the like, means temporarily or permanently reducing, inhibiting, or blocking the ability of an LDL molecule to bind to an LDL receptor. In some embodiments, “blocking” means downregulating gene expression of an LDLR such that less LDLR is expressed on a cell treated with a “blocking” agent (e.g., LDLR-specific siRNA) as compared to a control cell of the same cell type that is not treated with the “blocking” agent. In some embodiments, “blocking” means contacting the LDLR with an agent (e.g., an antibody or small molecule) that prohibits the binding of an LDL to the LDLR. In particular embodiments, an agent that blocks LDL binding to an LDLR also prevents LNP uptake into liver cells or liver tissue.

[0113] As used herein, “preventing LNP uptake into liver cells or tissue” or the like, means temporarily or permanently reducing, inhibiting, or blocking the ability of an LNP (e.g., an LNP carrying a payload) from being taken up by a liver cell or liver tissue by means of the LDL receptor. In particular embodiments, prevention of LNP uptake into liver cells or tissue is accomplished using an agent that blocks LDL binding to an LDLR. In some embodiments, preventing LNP uptake into liver cells or tissue is accomplished by using an agent (e.g., LDLR-specific siRNA or ASO) that downregulates expression of LDLR such that less LDLR is expressed on a cell treated with the agent than as compared to a control cell of the same cell type that is not treated with the agent.

[0114] As used herein, “RNAi compound,” “RNAi molecule,” or “RNAi” are used interchangeably and refer to inhibitory RNA. RNAi refers to an antisense compound that acts to modulate a target nucleic acid and/or protein encoded by a target nucleic acid. RNAi compounds include but are not limited to small interfering RNA (siRNA), single-stranded RNA (ssRNA), microRNA, including microRNA mimics, double-stranded RNA (dsRNA), short hairpin RNA (shRNA), and expression cassettes encoding RNA capable of inducing RNA interference. For example, RNAi expression cassettes can be transcribed in cells to produce siRNA, separate sense and anti-sense strand linear siRNA, or small hairpin RNAs that can function as miRNAs. As used herein, referencing “RNAi” and “siRNA” refers to the terms as used in the broadest sense and encompasses, for example, any siRNA that has been modified (e.g., chemical modification, attachment of at least one receptor-binding ligand or moiety) so long as the molecule retains the ability to bind to target nucleic acids in target cells, thereby reducing the target gene's expression. RNAi molecules are readily designed and generated by techniques known in the art.

[0115] As used herein, “antisense oligonucleotides” or “ASOs” refer to short strands of DNA or RNA that bind to a complementary RNA sequence, thereby inhibiting its function. ASOs can effectively downregulate or upregulate the production of certain downstream proteins by inhibiting specific RNA sequences, and can theoretically be used with both select loss of function and gain of function mutations. In the context of LDLR, an ASO may be used to downregulate expression of LDLR.

[0116] As used herein, “delivery molecule” or “liver targeting moiety” includes, but is not limited to, any molecule, ligand or conjugate that can be applied to an agent that blocks LDL binding to LDLR (e.g., siRNA, RNAi, ASO, or an anti-LDLR antibody) to enhance the agent's delivery and/or uptake by the liver, including any known liver-targeting conjugates, including, N-acetylgalactosamine (GalNAc) conjugates, and any other delivery system for liver or hepatic delivery of the agent (e.g., siRNA or RNAi). The selection of an appropriate molecule, ligand or conjugate for targeting siRNAs to particular body systems, organs, tissues or cells is considered to be within the ordinary skill of the art. For example, to target an siRNA to hepatocytes, cholesterol may be attached at one or more ends, including any combination of 5′- and 3′-ends, of an siRNA molecule. The resultant cholesterol-siRNA is delivered to hepatocytes in the liver, thereby providing a means to deliver siRNAs to this targeted location. Other ligands useful for targeting siRNAs to the liver include HBV surface antigen and low-density lipoprotein (LDL).

[0117] As used herein, “LNP” or “lipid nanoparticle” refers to a lipid-based delivery composition. LNPs are known in the art and refer to particles that comprises a plurality of (i.e., more than one) lipid molecules physically associated with each other by intermolecular forces. The LNPs may be, e.g., microspheres (including unilamellar and multilamellar vesicles, e.g., “liposomes”—lamellar phase lipid bilayers that, in some embodiments, are substantially spherical—and, in more particular embodiments, can comprise an aqueous core, e.g., comprising a substantial portion of RNA molecules), a dispersed phase in an emulsion, micelles, or an internal phase in a suspension. Emulsions, micelles, and suspensions may be suitable compositions for local and/or topical delivery. See also, e.g., WO2017173054A1, the contents of which are hereby incorporated by reference in their entirety. Any LNP known to those of skill in the art to be capable of delivering nucleotides, including siRNA or other RNAi, to subjects can be used herein.

[0118] As used herein, “lipoplex” (also used interchangeable with “lipid complex” or “lipid:vector complex”) refers to a heterogeneous complex, which self-assembles when nucleic acids (DNA, RNA) are mixed with cationic lipids. The lipid component of the lipoplex can facilitate the delivery of the nucleic acid to cells, as well as protect it from degradation in an extracellular environment. Non-limiting examples for use of a lipoplex include gene therapy and vaccine development.

[0119] As used herein, “antibody” is used in the broadest sense and encompasses various antibody structures, including but not limited to monoclonal antibodies, polyclonal antibodies, multispecific antibodies (e.g., bispecific antibodies), nanobodies, and antibody or antigen-binding fragments so long as they exhibit the desired antigen-binding activity. As used herein, “anti-LDLR antibody” refers to an antibody (as used in the broadest sense as set forth above) that blocks an interaction between LDL and LDLR.

[0120] The terms “composition” or “formulation” refer to a preparation which is in such form as to permit the biological activity of an active ingredient contained therein to be effective, and which contains no additional components which are unacceptably toxic to a subject to which the composition would be administered.

[0121] The terms “pharmaceutically acceptable carrier” or “pharmaceutically acceptable vehicle” refer to any diluent, adjuvant, excipient, or combinations thereof, in a pharmaceutical composition which allows, for example, facilitation of the administration of the active ingredient contained therein. Non-limiting examples of substances that can generally serve as pharmaceutically acceptable carriers include oils, glycols; polyols, such as glycerin, sorbitol, mannitol, and polyethylene glycol; esters; agar; buffering agents; water; isotonic saline solution; Ringer's solution; ethyl alcohol; pH buffer solution; and any other non-toxic compatible materials used in pharmaceutical preparations. Such carriers or vehicles should be non-toxic and should not interfere with the efficacy of the active ingredient. Pharmaceutically acceptable carriers are well known and will be adapted by the person skilled in the art as a function of the nature, route, and mode of administration.

[0122] As used herein, “treatment” (and variations thereof such as “treat” or “treating”) refers to any administration or application of a therapeutic for disease or disorder in a subject, and includes inhibiting the disease or development of the disease (which may occur before or after the disease is formally diagnosed, e.g., in cases where a subject has a genotype that has the potential or is likely to result in development of the disease), arresting its development, relieving one or more symptoms of the disease, curing the disease, or preventing reoccurrence of one or more symptoms of the disease. As used herein, “treatment” can include administrating a therapeutic or therapeutic regimen including optional adjuvant or pre-conditioning regimen to achieve a therapeutic or prophylactic benefit. As used herein, “treatment” also encompasses “ameliorating,” which refers to any beneficial effect on a phenotype or symptom, such as reducing its severity, slowing or delaying its development, arresting its development, or partially or completely reversing or eliminating it.

[0123] “Pre-conditioning,” “preconditioning,” or “conditioning” are used interchangeably herein and refer to the preparation of the subject in need of the non-liver payload-based gene therapy for a suitable condition, which includes blocking LDL binding to LDL receptors in the liver prior to the subject receiving the payload-based gene therapy.

[0124] As used herein, the term “administering” refers to the physical introduction of an agent to a subject, using any of the various methods and delivery systems known to those skilled in the art. Exemplary routes of administration for the agents disclosed herein include intravenous, intramuscular, subcutaneous, intraperitoneal, spinal or other parenteral routes of administration, for example by injection or infusion. The phrase “parenteral administration” as used herein means modes of administration other than enteral and topical administration, usually by injection, and includes, without limitation, intravenous, intramuscular, intraarterial, intrathecal, intralymphatic, intralesional, intracapsular, intraorbital, intracardiac, intradermal, intraperitoneal, transtracheal, subcutaneous, subcuticular, intraarticular, subcapsular, subarachnoid, intraspinal, epidural and intrasternal injection and infusion, as well as in vivo electroporation. In some embodiments, the agents disclosed herein may be administered via a non-parenteral route, e.g., orally. Other non-parenteral routes include a topical, epidermal, or mucosal route of administration, for example, intranasally, vaginally, rectally, sublingually or topically. The phrase “systemic injection” as used herein non-exclusively relates to intravenous, intraperitoneally, subcutaneous, via nasal submucosa, lingual, via bronchoscopy, intravenous, intra-arterial, intra-muscular, intro-ocular, intra-striatal, subcutaneous, intradermal, by dermal patch, by skin patch, by patch, into the cerebrospinal fluid, into the portal vein, into the brain, into the lymphatic system, intra-pleural, retro-orbital, intra-dermal, into the spleen, intra-lymphatic, among others. “Co-administration,” as used herein, means that a plurality of substances are administered sufficiently close together in time so that the agents act together. Co-administration encompasses administering substances together in a single formulation and administering substances in separate formulations close enough in time so that the agents act together.

[0125] As used herein, “subject” may be a mammal, such as a primate, ungulate (e.g., cow, pig, horse), cat, dog, domestic pet or domesticated mammal. In some cases, the mammal may be a rabbit, pig, horse, sheep, cow, cat or dog, or a human. In some embodiments, the subject is a human. In some embodiments, the subject is an adult human. In some embodiments, the subject is a juvenile human. In some embodiments, the subject is greater than about 18 years old, greater than about 25 years old, or greater than about 35 years old. In some embodiments, the subject is less than about 18 years old, less than about 16 years old, less than about 14 years old, less than about 12 years old, less than about 10 years old, less than about 8 years old, less than about 6 years old, less than about 5 years old, less than about 4 years old, less than about 3 years old, less than about 2 years old, less than about 1 year old, or less than about 6 months old.

### II. Compositions

[0126] Disclosed herein are compositions comprising one or more agents to block and/or that are useful for blocking LDL binding to LDLR, and/or for preventing LNP uptake into liver cells. In some embodiments, the composition comprises an agent that blocks LDL binding to LDLR and a delivery molecule that delivers the agent to the liver. In some embodiments, the composition comprises a) an agent that blocks LDL binding to LDLR and/or for preventing LNP uptake into liver cells or tissue and b) a delivery molecule that delivers the agent to the liver. In some embodiments, the composition further comprises a payload comprising a therapeutic that is optionally encapsulated within or associated with an LNP or lipoplex.

[0127] In some embodiments, the composition is capable of temporarily blocking LDL binding to LDLR in the liver and/or for preventing LNP uptake into liver cells or tissue, including for about 48 hours to about 3 weeks. In some embodiments, the composition is capable of permanently blocking LDL binding to LDLR in the liver and/or for preventing LNP uptake into liver cells or tissue. In some embodiments, the composition is capable of blocking LDL binding to LDLR in the liver and/or for preventing LNP uptake into liver cells or tissue for about 2 days, about 3 days, about 4 days, about 5 days, about 6 days, about 7 days, about 8 days, about 9 days, about 10 days, about 11 days, about 12 days, about 13 days, about 14 days, about 15 days, about 16, days, about 17 days, about 18 days, about 19 days, about 20 days, or about 21 days. In some embodiments, the composition is capable of blocking LDL binding to LDLR in the liver and/or for preventing LNP uptake into liver cells or tissue for about 7 days, about 8 days, about 9 days, about 10 days, about 11 days, about 12 days, about 13 days, or about 14 days. In some embodiments, the composition is capable of blocking LDL binding to LDLR in the liver and/or for preventing LNP uptake into liver cells or tissue for about 1-28 days, 7-28 days, 14-28 days, 21-28 days, 1-21 days, 7-21 days, 14-21 days, 1-14 days, 7-14 days, or about 1-7 days.

[0128] In some embodiments, a payload and an LNP or lipoplex is administered during or after the administration of the composition. In some embodiments, the composition is capable of long-term blocking of LDL binding to LDLR in the liver and/or for preventing LNP uptake into liver cells or tissue, including for longer than about 3 weeks, longer than about 4 weeks, longer than about 5 weeks, longer than about 6 weeks, longer than about 7 weeks, longer than about 8 weeks, longer than about 9 weeks, and longer than about 10 weeks. In some embodiments, the composition is capable of long-term blocking of LDL binding to LDLR in the liver and/or for preventing LNP uptake into liver cells or tissue, including for longer than 10 weeks. In some embodiments, the composition is capable of blocking LDL binding to LDLR in the liver and/or for preventing LNP uptake into liver cells or tissue for about 10-15 weeks, about 15-20 weeks, about 20-25 weeks, about 25-30 weeks, about 30-35 weeks, about 35-40 weeks, about 40-45 weeks, about 45-50 weeks, or about 50-55 weeks.

### A. RNAi as Agent

[0129] In some embodiments, RNA interference (RNAi) is the mechanism by which the agent uses to block LDL binding to LDLR in the liver and/or for preventing LNP uptake into liver cells or tissue. RNA interference refers to sequence- or gene-specific suppression of gene expression (protein synthesis) mediated by RNAi/siRNA in an organism without generally suppressing other protein synthesis. RNAi induces RNA interference through interaction with the RNA interference pathway in mammalian cells in order to degrade or inhibit the translation of messenger RNA (mRNA) transcripts of transgenes in a sequence-specific manner. RNAi directed toward major receptor proteins can lead to decreased protein expression of the target of the RNAi (e.g., LDLR). RNAi can be accomplished through the use of small interfering RNA (siRNA), microRNA (miRNA), double-stranded RNA (dsRNA), short hairpin RNA (shRNA), and expression cassettes encoding RNA capable of inducing RNA interference.

[0130] In some embodiments, the agent that blocks LDL binding to LDLR and/or for preventing LNP uptake into liver cells or tissue is small-interfering RNA (siRNA). Small interfering RNAs (siRNAs) are known for their ability to specifically interfere with protein expression in a target. siRNAs are designed to interact with a target ribonucleotide sequence, meaning they complement a target sequence sufficiently to bind to the target sequence. siRNAs generally contain 15-50 base pairs, preferably 21-25 base pairs, and encode a sequence of a target gene or RNA. The siRNA can have complete or partial identity (e.g., complementarity) with its target.

[0131] siRNA has been criticized for its transient nature, due to its instability in vivo. However, in this context, siRNA's temporal nature can be a benefit so that the agent is able to block LDL from binding to LDLR and/or for preventing LNP uptake into liver cells or tissue only for a short time during which a payload and LNP or lipoplex are delivered, thereby reducing off-target delivery of the payload to the liver.

[0132] In some embodiments, any of the agents, e.g., RNAi molecules and/or compositions disclosed herein, are capable of temporarily blocking LDL binding to LDL receptors (LDLR) and/or for preventing LNP uptake into liver cells or tissue, including for about 48 hours to about 3 weeks. In some embodiments, the agent, e.g., RNAi molecule and/or composition disclosed herein is capable of blocking LDL binding to LDLR and/or for preventing LNP uptake into liver cells or tissue for about 2 days, about 3 days, about 4 days, about 5 days, about 6 days, about 7 days, about 8 days, about 9 days, about 10 days, about 11 days, about 12 days, about 13 days, about 14 days, about 15 days, about 16, days, about 17 days, about 18 days, about 19 days, about 20 days, or about 21 days. In some embodiments, the agent, e.g., RNAi molecule and/or composition disclosed herein is capable of blocking LDL binding to LDLR and/or for preventing LNP uptake into liver cells or tissue for about 7 days, about 8 days, about 9 days, about 10 days, about 11 days, about 12 days, about 13 days, about 14 days. In some embodiments, the agent, e.g., RNAi molecule and/or composition disclosed herein is capable of blocking LDL binding to LDLR and/or for preventing LNP uptake into liver cells or tissue for 1-28 days, 7-28 days, 14-28 days, 21-28 days, 1-21 days, 7-21 days, 14-21 days, 1-14 days, 7-14 days, or 1-7 days.

[0133] In some embodiments, the agent, e.g., RNAi molecule and/or composition disclosed herein targets an LDLR-encoding transcript to reduce or block its expression. In some embodiments, the LDLR-encoding transcript comprises a sequence that is at least 80%, 85%, 90%, 91%, 92%, 93%, 94%, 95%, 96%, 97%, 98%, 99% or 100% identical to the sequence of SEQ ID NO: 350, or a reverse complement thereof. In some embodiments, the agent, e.g., RNAi molecule and/or composition disclosed herein targets 19, 20, 21, 22, 23, 24, 25, 26, 27, 28, 29, 30, 31 or 32 contiguous nucleotides of a sequence that is at least 80%, 85%, 90%, 91%, 92%, 93%, 94%, 95%, 96%, 97%, 98%, 99% or 100% identical to the sequence of SEQ ID NO: 350, or a reverse complement thereof. In some embodiments, the agent, e.g., RNAi molecule and/or composition disclosed herein targets 19-32, 19-25, 19-22, or 20-21 contiguous nucleotides of a sequence that is at least 80%, 85%, 90%, 91%, 92%, 93%, 94%, 95%, 96%, 97%, 98%, 99% or 100% identical to the sequence of SEQ ID NO: 350, or a reverse complement thereof. SEQ ID NO: 350:

GTGCAATCGCGGGAAGCCAGGGTTTCCAGCTAGGACACAGCAGGTCGTGATCCGGGTCG
GGACACTGCCTGGCAGAGGCTGCGAGCATGGGGCCCTGGGGCTGGAAATTGCGCTGGAC
CGTCGCCTTGCTCCTCGCCGCGGCGGGGACTGCAGTGGGCGACAGATGCGAAAGAAACG
AGTTCCAGTGCCAAGACGGGAAATGCATCTCCTACAAGTGGGTCTGCGATGGCAGCGCT
GAGTGCCAGGATGGCTCTGATGAGTCCCAGGAGACGTGCTTGTCTGTCACCTGCAAATCC
GGGGACTTCAGCTGTGGGGGCCGTGTCAACCGCTGCATTCCTCAGTTCTGGAGGTGCGAT
GGCCAAGTGGACTGCGACAACGGCTCAGACGAGCAAGGCTGTCCCCCCAAGACGTGCTC
CCAGGACGAGTTTCGCTGCCACGATGGGAAGTGCATCTCTCGGCAGTTCGTCTGTGACTC
AGACCGGGACTGCTTGGACGGCTCAGACGAGGCCTCCTGCCCGGTGCTCACCTGTGGTCC
CGCCAGCTTCCAGTGCAACAGCTCCACCTGCATCCCCCAGCTGTGGGCCTGCGACAACGA
CCCCGACTGCGAAGATGGCTCGGATGAGTGGCCGCAGCGCTGTAGGGGTCTTTACGTGTT
CCAAGGGGACAGTAGCCCCTGCTCGGCCTTCGAGTTCCACTGCCTAAGTGGCGAGTGCAT
CCACTCCAGCTGGCGCTGTGATGGTGGCCCCGACTGCAAGGACAAATCTGACGAGGAAA
ACTGCGCTGTGGCCACCTGTCGCCCTGACGAATTCCAGTGCTCTGATGGAAACTGCATCC
ATGGCAGCCGGCAGTGTGACCGGGAATATGACTGCAAGGACATGAGCGATGAAGTTGGC
TGCGTTAATGTGACACTCTGCGAGGGACCCAACAAGTTCAAGTGTCACAGCGGCGAATG
CATCACCCTGGACAAAGTCTGCAACATGGCTAGAGACTGCCGGGACTGGTCAGATGAAC
CCATCAAAGAGTGCGGGACCAACGAATGCTTGGACAACAACGGCGGCTGTTCCCACGTC
TGCAATGACCTTAAGATCGGCTACGAGTGCCTGTGCCCCGACGGCTTCCAGCTGGTGGCC
CAGCGAAGATGCGAAGATATCGATGAGTGTCAGGATCCCGACACCTGCAGCCAGCTCTG
CGTGAACCTGGAGGGTGGCTACAAGTGCCAGTGTGAGGAAGGCTTCCAGCTGGACCCCC
ACACGAAGGCCTGCAAGGCTGTGGGCTCCATCGCCTACCTCTTCTTCACCAACCGGCACG
AGGTCAGGAAGATGACGCTGGACCGGAGCGAGTACACCAGCCTCATCCCCAACCTGAGG
AACGTGGTCGCTCTGGACACGGAGGTGGCCAGCAATAGAATCTACTGGTCTGACCTGTCC
CAGAGAATGATCTGCAGCACCCAGCTTGACAGAGCCCACGGCGTCTCTTCCTATGACACC
GTCATCAGCAGAGACATCCAGGCCCCCGACGGGCTGGCTGTGGACTGGATCCACAGCAA
CATCTACTGGACCGACTCTGTCCTGGGCACTGTCTCTGTTGCGGATACCAAGGGCGTGAA
GAGGAAAACGTTATTCAGGGAGAACGGCTCCAAGCCAAGGGCCATCGTGGTGGATCCTG
TTCATGGCTTCATGTACTGGACTGACTGGGGAACTCCCGCCAAGATCAAGAAAGGGGGC
CTGAATGGTGTGGACATCTACTCGCTGGTGACTGAAAACATTCAGTGGCCCAATGGCATC
ACCCTAGATCTCCTCAGTGGCCGCCTCTACTGGGTTGACTCCAAACTTCACTCCATCTCAA
GCATCGATGTCAACGGGGGCAACCGGAAGACCATCTTGGAGGATGAAAAGAGGCTGGCC
CACCCCTTCTCCTTGGCCGTCTTTGAGGACAAAGTATTTTGGACAGATATCATCAACGAA
GCCATTTTCAGTGCCAACCGCCTCACAGGTTCCGATGTCAACTTGTTGGCTGAAAACCTA
CTGTCCCCAGAGGATATGGTTCTCTTCCACAACCTCACCCAGCCAAGAGGAGTGAACTGG
TGTGAGAGGACCACCCTGAGCAATGGCGGCTGCCAGTATCTGTGCCTCCCTGCCCCGCAG
ATCAACCCCCACTCGCCCAAGTTTACCTGCGCCTGCCCGGACGGCATGCTGCTGGCCAGG
GACATGAGGAGCTGCCTCACAGAGGCTGAGGCTGCAGTGGCCACCCAGGAGACATCCAC
CGTCAGGCTAAAGGTCAGCTCCACAGCCGTAAGGACACAGCACACAACCACCCGACCTG
TTCCCGACACCTCCCGGCTGCCTGGGGCCACCCCTGGGCTCACCACGGTGGAGATAGTGA
CAATGTCTCACCAAGCTCTGGGCGACGTTGCTGGCAGAGGAAATGAGAAGAAGCCCAGT
AGCGTGAGGGCTCTGTCCATTGTCCTCCCCATCGTGCTCCTCGTCTTCCTTTGCCTGGGGG
TCTTCCTTCTATGGAAGAACTGGCGGCTTAAGAACATCAACAGCATCAACTTTGACAACC
CCGTCTATCAGAAGACCACAGAGGATGAGGTCCACATTTGCCACAACCAGGACGGCTAC
AGCTACCCCTCGAGACAGATGGTCAGTCTGGAGGATGACGTGGCGTGAACATCTGCCTG
GAGTCCCGTCCCTGCCCAGAACCCTTCCTGAGACCTCGCCGGCCTTGTTTTATTCAAAGA
CAGAGAAGACCAAAGCATTGCCTGCCAGAGCTTTGTTTTATATATTTATTCATCTGGGAG
GCAGAACAGGCTTCGGACAGTGCCCATGCAATGGCTTGGGTTGGGATTTTGGTTTCTTCC
TTTCCTCGTGAAGGATAAGAGAAACAGGCCCGGGGGGACCAGGATGACACCTCCATTTC
TCTCCAGGAAGTTTTGAGTTTCTCTCCACCGTGACACAATCCTCAAACATGGAAGATGAA
AGGGGAGGGGATGTCAGGCCCAGAGAAGCAAGTGGCTTTCAACACACAACAGCAGATG
GCACCAACGGGACCCCCTGGCCCTGCCTCATCCACCAATCTCTAAGCCAAACCCCTAAAC
TCAGGAGTCAACGTGTTTACCTCTTCTATGCAAGCCTTGCTAGACAGCCAGGTTAGCCTT
TGCCCTGTCACCCCCGAATCATGACCCACCCAGTGTCTTTCGAGGTGGGTTTGTACCTTCC
TTAAGCCAGGAAAGGGATTCATGGCGTCGGAAATGATCTGGCTGAATCCGTGGTGGCAC
CGAGACCAAACTCATTCACCAAATGATGCCACTTCCCAGAGGCAGAGCCTGAGTCACTG
GTCACCCTTAATATTTATTAAGTGCCTGAGACACCCGGTTACCTTGGCCGTGAGGACACG
TGGCCTGCACCCAGGTGTGGCTGTCAGGACACCAGCCTGGTGCCCATCCTCCCGACCCCT
ACCCACTTCCATTCCCGTGGTCTCCTTGCACTTTCTCAGTTCAGAGTTGTACACTGTGTAC
ATTTGGCATTTGTGTTATTATTTTGCACTGTTTTCTGTCGTGTGTGTTGGGATGGGATCCC
AGGCCAGGGAAAGCCCGTGTCAATGAATGCCGGGGACAGAGAGGGGCAGGTTGACCGG
GACTTCAAAGCCGTGATCGTGAATATCGAGAACTGCCATTGTCGTCTTTATGTCCGCCCA
CCTAGTGCTTCCACTTCTATGCAAATGCCTCCAAGCCATTCACTTCCCCAATCTTGTCGTT
GATGGGTATGTGTTTAAAACATGCACGGTGAGGCCGGGCGCAGTGGCTCACGCCTGTAA
TCCCAGCACTTTGGGAGGCCGAGGCGGGTGGATCATGAGGTCAGGAGATCGAGACCATC
CTGGCTAACACGTGAAACCCCGTCTCTACTAAAAATACAAAAAATTAGCCGGGCGTGGT
GGCGGGCACCTGTAGTCCCAGCTACTCGGGAGGCTGAGGCAGGAGAATGGTGTGAACCC
GGGAAGCGGAGCTTGCAGTGAGCCGAGATTGCGCCACTGCAGTCCGCAGTCTGGCCTGG
GCGACAGAGCGAGACTCCGTCTCAAAAAAAAAAAACAAAAAAAAACCATGCATGGTGC
ATCAGCAGCCCATGGCCTCTGGCCAGGCATGGCGAGGCTGAGGTGGGAGGATGGTTTGA
GCTCAGGCATTTGAGGCTGTCGTGAGCTATGATTATGCCACTGCTTTCCAGCCTGGGCAA
CATAGTAAGACCCCATCTCTTAAAAAATGAATTTGGCCAGACACAGGTGCCTCACGCCTG
TAATCCCAGCACTTTGGGAGGCTGAGCTGGATCACTTGAGTTCAGGAGTTGGAGACCAG
GCCTGAGCAACAAAGCGAGATCCCATCTCTACAAAAACCAAAAAGTTAAAAATCAGCTG
GGTACGGTGGCACGTGCCTGTGATCCCAGCTACTTGGGAGGCTGAGGCAGGAGGATCGC
CTGAGCCCAGGAGGTGGAGGTTGCAGTGAGCCATGATCGAGCCACTGCACTCCAGCCTG
GGCAACAGATGAAGACCCTATTTCAGAAATACAACTATAAAAAAATAAATAAATCCTCC
AGTCTGGATCGTTTGACGGGACTTCAGGTTCTTTCTGAAATCGCCGTGTTACTGTTGCACT
GATGTCCGGAGAGACAGTGACAGCCTCCGTCAGACTCCCGCGTGAAGATGTCACAAGGG
ATTGGCAATTGTCCCCAGGGACAAAACACTGTGTCCCCCCCAGTGCAGGGAACCGTGAT
AAGCCTTTCTGGTTTCGGAGCACGTAAATGCGTCCCTGTACAGATAGTGGGGATTTTTTG
TTATGTTTGCACTTTGTATATTGGTTGAAACTGTTATCACTTATATATATATATATACACA
CATATATATAAAATCTATTTATTTTTGCAAACCCTGGTTGCTGTATTTGTTCAGTGACTAT
TCTCGGGGCCCTGTGTAGGGGGTTATTGCCTCTGAAATGCCTCTTCTTTATGTACAAAGAT
TATTTGCACGAACTGGACTGTGTGCAACGCTTTTTGGGAGAATGATGTCCCCGTTGTATG
TATGAGTGGCTTCTGGGAGATGGGTGTCACTTTTTAAACCACTGTATAGAAGGTTTTTGT
AGCCTGAATGTCTTACTGTGATCAATTAAATTTCTTAAATGAACCAA.

[0134] In some embodiments, the agent, e.g., RNAi molecule and/or composition disclosed herein targets an LDLR-encoding transcript. In some embodiments, the LDLR-encoding transcript comprises a sequence that is at least 80%, 85%, 90%, 91%, 92%, 93%, 94%, 95%, 96%, 97%, 98%, 99% or 100% identical to the sequence of SEQ ID NO: 351, or a reverse complement thereof. In some embodiments, the agent, e.g., RNAi molecule and/or composition disclosed herein targets 19, 20, 21, 22, 23, 24, 25, 26, 27, 28, 29, 30, 31 or 32 contiguous nucleotides of a sequence that is at least 80%, 85%, 90%, 91%, 92%, 93%, 94%, 95%, 96%, 97%, 98%, 99% or 100% identical to the sequence of SEQ ID NO: 351, or a reverse complement thereof. In some embodiments, the agent, e.g., RNAi molecule and/or composition disclosed herein targets 19-32, 19-25, 19-22, or 20-21 contiguous nucleotides of a sequence that is at least 80%, 85%, 90%, 91%, 92%, 93%, 94%, 95%, 96%, 97%, 98%, 99% or 100% identical to the sequence of SEQ ID NO: 351, or a reverse complement thereof SEQ ID NO: 351:

GTGCAATCGCGGGAAGCCAGGGTTTCCAGCTAGGACACAGCAGGTCGTGATCCGGGTCG
GGACACTGCCTGGCAGAGGCTGCGAGCATGGGGCCCTGGGGCTGGAAATTGCGCTGGAC
CGTCGCCTTGCTCCTCGCCGCGGCGGGGACTGCAGTGGGCGACAGATGCGAAAGAAACG
AGTTCCAGTGCCAAGACGGGAAATGCATCTCCTACAAGTGGGTCTGCGATGGCAGCGCT
GAGTGCCAGGATGGCTCTGATGAGTCCCAGGAGACGTGCTTGTCTGTCACCTGCAAATCC
GGGGACTTCAGCTGTGGGGGCCGTGTCAACCGCTGCATTCCTCAGTTCTGGAGGTGCGAT
GGCCAAGTGGACTGCGACAACGGCTCAGACGAGCAAGGCTGTCCCCCCAAGACGTGCTC
CCAGGACGAGTTTCGCTGCCACGATGGGAAGTGCATCTCTCGGCAGTTCGTCTGTGACTC
AGACCGGGACTGCTTGGACGGCTCAGACGAGGCCTCCTGCCCGGTGCTCACCTGTGGTCC
CGCCAGCTTCCAGTGCAACAGCTCCACCTGCATCCCCCAGCTGTGGGCCTGCGACAACGA
CCCCGACTGCGAAGATGGCTCGGATGAGTGGCCGCAGCGCTGTAGGGGTCTTTACGTGTT
CCAAGGGGACAGTAGCCCCTGCTCGGCCTTCGAGTTCCACTGCCTAAGTGGCGAGTGCAT
CCACTCCAGCTGGCGCTGTGATGGTGGCCCCGACTGCAAGGACAAATCTGACGAGGAAA
ACTGCGCTGTGGCCACCTGTCGCCCTGACGAATTCCAGTGCTCTGATGGAAACTGCATCC
ATGGCAGCCGGCAGTGTGACCGGGAATATGACTGCAAGGACATGAGCGATGAAGTTGGC
TGCGTTAATGTGACACTCTGCGAGGGACCCAACAAGTTCAAGTGTCACAGCGGCGAATG
CATCACCCTGGACAAAGTCTGCAACATGGCTAGAGACTGCCGGGACTGGTCAGATGAAC
CCATCAAAGAGTGCGGGACCAACGAATGCTTGGACAACAACGGCGGCTGTTCCCACGTC
TGCAATGACCTTAAGATCGGCTACGAGTGCCTGTGCCCCGACGGCTTCCAGCTGGTGGCC
CAGCGAAGATGCGAAGATATCGATGAGTGTCAGGATCCCGACACCTGCAGCCAGCTCTG
CGTGAACCTGGAGGGTGGCTACAAGTGCCAGTGTGAGGAAGGCTTCCAGCTGGACCCCC
ACACGAAGGCCTGCAAGGCTGTGGGCTCCATCGCCTACCTCTTCTTCACCAACCGGCACG
AGGTCAGGAAGATGACGCTGGACCGGAGCGAGTACACCAGCCTCATCCCCAACCTGAGG
AACGTGGTCGCTCTGGACACGGAGGTGGCCAGCAATAGAATCTACTGGTCTGACCTGTCC
CAGAGAATGATCTGCAGCACCCAGCTTGACAGAGCCCACGGCGTCTCTTCCTATGACACC
GTCATCAGCAGAGACATCCAGGCCCCCGACGGGCTGGCTGTGGACTGGATCCACAGCAA
CATCTACTGGACCGACTCTGTCCTGGGCACTGTCTCTGTTGCGGATACCAAGGGCGTGAA
GAGGAAAACGTTATTCAGGGAGAACGGCTCCAAGCCAAGGGCCATCGTGGTGGATCCTG
TTCATGGCTTCATGTACTGGACTGACTGGGGAACTCCCGCCAAGATCAAGAAAGGGGGC
CTGAATGGTGTGGACATCTACTCGCTGGTGACTGAAAACATTCAGTGGCCCAATGGCATC
ACCCTAGATCTCCTCAGTGGCCGCCTCTACTGGGTTGACTCCAAACTTCACTCCATCTCAA
GCATCGATGTCAACGGGGGCAACCGGAAGACCATCTTGGAGGATGAAAAGAGGCTGGCC
CACCCCTTCTCCTTGGCCGTCTTTGAGGACAAAGTATTTTGGACAGATATCATCAACGAA
GCCATTTTCAGTGCCAACCGCCTCACAGGTTCCGATGTCAACTTGTTGGCTGAAAACCTA
CTGTCCCCAGAGGATATGGTTCTCTTCCACAACCTCACCCAGCCAAGAGGAGTGAACTGG
TGTGAGAGGACCACCCTGAGCAATGGCGGCTGCCAGTATCTGTGCCTCCCTGCCCCGCAG
ATCAACCCCCACTCGCCCAAGTTTACCTGCGCCTGCCCGGACGGCATGCTGCTGGCCAGG
GACATGAGGAGCTGCCTCACAGAGGCTGAGGCTGCAGTGGCCACCCAGGAGACATCCAC
CGTCAGGCTAAAGGTCAGCTCCACAGCCGTAAGGACACAGCACACAACCACCCGACCTG
TTCCCGACACCTCCCGGCTGCCTGGGGCCACCCCTGGGCTCACCACGGTGGAGATAGTGA
CAATGTCTCACCAAGCTCTGGGCGACGTTGCTGGCAGAGGAAATGAGAAGAAGCCCAGT
AGCGTGAGGGCTCTGTCCATTGTCCTCCCCATCGTGCTCCTCGTCTTCCTTTGCCTGGGGG
TCTTCCTTCTATGGAAGAACTGGCGGCTTAAGAACATCAACAGCATCAACTTTGACAACC
CCGTCTATCAGAAGACCACAGAGGATGAGGTCCACATTTGCCACAACCAGGACGGCTAC
AGCTACCCCTCGATGGTCAGTCTGGAGGATGACGTGGCGTGAACATCTGCCTGGAGTCCC
GTCCCTGCCCAGAACCCTTCCTGAGACCTCGCCGGCCTTGTTTTATTCAAAGACAGAGAA
GACCAAAGCATTGCCTGCCAGAGCTTTGTTTTATATATTTATTCATCTGGGAGGCAGAAC
AGGCTTCGGACAGTGCCCATGCAATGGCTTGGGTTGGGATTTTGGTTTCTTCCTTTCCTCG
TGAAGGATAAGAGAAACAGGCCCGGGGGGACCAGGATGACACCTCCATTTCTCTCCAGG
AAGTTTTGAGTTTCTCTCCACCGTGACACAATCCTCAAACATGGAAGATGAAAGGGGAG
GGGATGTCAGGCCCAGAGAAGCAAGTGGCTTTCAACACACAACAGCAGATGGCACCAAC
GGGACCCCCTGGCCCTGCCTCATCCACCAATCTCTAAGCCAAACCCCTAAACTCAGGAGT
CAACGTGTTTACCTCTTCTATGCAAGCCTTGCTAGACAGCCAGGTTAGCCTTTGCCCTGTC
ACCCCCGAATCATGACCCACCCAGTGTCTTTCGAGGTGGGTTTGTACCTTCCTTAAGCCA
GGAAAGGGATTCATGGCGTCGGAAATGATCTGGCTGAATCCGTGGTGGCACCGAGACCA
AACTCATTCACCAAATGATGCCACTTCCCAGAGGCAGAGCCTGAGTCACTGGTCACCCTT
AATATTTATTAAGTGCCTGAGACACCCGGTTACCTTGGCCGTGAGGACACGTGGCCTGCA
CCCAGGTGTGGCTGTCAGGACACCAGCCTGGTGCCCATCCTCCCGACCCCTACCCACTTC
CATTCCCGTGGTCTCCTTGCACTTTCTCAGTTCAGAGTTGTACACTGTGTACATTTGGCAT
TTGTGTTATTATTTTGCACTGTTTTCTGTCGTGTGTGTTGGGATGGGATCCCAGGCCAGGG
AAAGCCCGTGTCAATGAATGCCGGGGACAGAGAGGGGCAGGTTGACCGGGACTTCAAA
GCCGTGATCGTGAATATCGAGAACTGCCATTGTCGTCTTTATGTCCGCCCACCTAGTGCTT
CCACTTCTATGCAAATGCCTCCAAGCCATTCACTTCCCCAATCTTGTCGTTGATGGGTATG
TGTTTAAAACATGCACGGTGAGGCCGGGCGCAGTGGCTCACGCCTGTAATCCCAGCACTT
TGGGAGGCCGAGGCGGGTGGATCATGAGGTCAGGAGATCGAGACCATCCTGGCTAACAC
GTGAAACCCCGTCTCTACTAAAAATACAAAAAATTAGCCGGGCGTGGTGGCGGGCACCT
GTAGTCCCAGCTACTCGGGAGGCTGAGGCAGGAGAATGGTGTGAACCCGGGAAGCGGA
GCTTGCAGTGAGCCGAGATTGCGCCACTGCAGTCCGCAGTCTGGCCTGGGCGACAGAGC
GAGACTCCGTCTCAAAAAAAAAAAACAAAAAAAAACCATGCATGGTGCATCAGCAGCCC
ATGGCCTCTGGCCAGGCATGGCGAGGCTGAGGTGGGAGGATGGTTTGAGCTCAGGCATT
TGAGGCTGTCGTGAGCTATGATTATGCCACTGCTTTCCAGCCTGGGCAACATAGTAAGAC
CCCATCTCTTAAAAAATGAATTTGGCCAGACACAGGTGCCTCACGCCTGTAATCCCAGCA
CTTTGGGAGGCTGAGCTGGATCACTTGAGTTCAGGAGTTGGAGACCAGGCCTGAGCAAC
AAAGCGAGATCCCATCTCTACAAAAACCAAAAAGTTAAAAATCAGCTGGGTACGGTGGC
ACGTGCCTGTGATCCCAGCTACTTGGGAGGCTGAGGCAGGAGGATCGCCTGAGCCCAGG
AGGTGGAGGTTGCAGTGAGCCATGATCGAGCCACTGCACTCCAGCCTGGGCAACAGATG
AAGACCCTATTTCAGAAATACAACTATAAAAAAATAAATAAATCCTCCAGTCTGGATCGT
TTGACGGGACTTCAGGTTCTTTCTGAAATCGCCGTGTTACTGTTGCACTGATGTCCGGAG
AGACAGTGACAGCCTCCGTCAGACTCCCGCGTGAAGATGTCACAAGGGATTGGCAATTG
TCCCCAGGGACAAAACACTGTGTCCCCCCCAGTGCAGGGAACCGTGATAAGCCTTTCTGG
TTTCGGAGCACGTAAATGCGTCCCTGTACAGATAGTGGGGATTTTTTGTTATGTTTGCACT
TTGTATATTGGTTGAAACTGTTATCACTTATATATATATATATACACACATATATATAAAA
TCTATTTATTTTTGCAAACCCTGGTTGCTGTATTTGTTCAGTGACTATTCTCGGGGCCCTG
TGTAGGGGGTTATTGCCTCTGAAATGCCTCTTCTTTATGTACAAAGATTATTTGCACGAAC
TGGACTGTGTGCAACGCTTTTTGGGAGAATGATGTCCCCGTTGTATGTATGAGTGGCTTC
TGGGAGATGGGTGTCACTTTTTAAACCACTGTATAGAAGGTTTTTGTAGCCTGAATGTCT
TACTGTGATCAATTAAATTTCTTAAATGAACCAA.

[0135] In some embodiments, the agent, e.g., RNAi molecule and/or composition disclosed herein targets an LDLR-encoding transcript. In some embodiments, the LDLR-encoding transcript comprises a sequence that is at least 80%, 85%, 90%, 91%, 92%, 93%, 94%, 95%, 96%, 97%, 98%, 99% or 100% identical to the sequence of SEQ ID NO: 352, or a reverse complement thereof. In some embodiments, the agent, e.g., RNAi molecule and/or composition disclosed herein targets 19, 20, 21, 22, 23, 24, 25, 26, 27, 28, 29, 30, 31 or 32 contiguous nucleotides of a sequence that is at least 80%, 85%, 90%, 91%, 92%, 93%, 94%, 95%, 96%, 97%, 98%, 99% or 100% identical to the sequence of SEQ ID NO: 352, or a reverse complement thereof. In some embodiments, the agent, e.g., RNAi molecule and/or composition disclosed herein targets 19-32, 19-25, 19-22, or 20-21 contiguous nucleotides of a sequence that is at least 80%, 85%, 90%, 91%, 92%, 93%, 94%, 95%, 96%, 97%, 98%, 99% or 100% identical to the sequence of SEQ ID NO: 352, or a reverse complement thereof SEQ ID NO: 352:

GTGCAATCGCGGGAAGCCAGGGTTTCCAGCTAGGACACAGCAGGTCGTGATCCGGGTCG
GGACACTGCCTGGCAGAGGCTGCGAGCATGGGGCCCTGGGGCTGGAAATTGCGCTGGAC
CGTCGCCTTGCTCCTCGCCGCGGCGGGGACTGCAGTGGGCGACAGATGCGAAAGAAACG
AGTTCCAGTGCCAAGACGGGAAATGCATCTCCTACAAGTGGGTCTGCGATGGCAGCGCT
GAGTGCCAGGATGGCTCTGATGAGTCCCAGGAGACGTGCTTGTCTGTCACCTGCAAATCC
GGGGACTTCAGCTGTGGGGGCCGTGTCAACCGCTGCATTCCTCAGTTCTGGAGGTGCGAT
GGCCAAGTGGACTGCGACAACGGCTCAGACGAGCAAGGCTGTCCCCCCAAGACGTGCTC
CCAGGACGAGTTTCGCTGCCACGATGGGAAGTGCATCTCTCGGCAGTTCGTCTGTGACTC
AGACCGGGACTGCTTGGACGGCTCAGACGAGGCCTCCTGCCCGGTGCTCACCTGTGGTCC
CGCCAGCTTCCAGTGCAACAGCTCCACCTGCATCCCCCAGCTGTGGGCCTGCGACAACGA
CCCCGACTGCGAAGATGGCTCGGATGAGTGGCCGCAGCGCTGTAGGGGTCTTTACGTGTT
CCAAGGGGACAGTAGCCCCTGCTCGGCCTTCGAGTTCCACTGCCTAAGTGGCGAGTGCAT
CCACTCCAGCTGGCGCTGTGATGGTGGCCCCGACTGCAAGGACAAATCTGACGAGGAAA
ACTGCGCTGTGGCCACCTGTCGCCCTGACGAATTCCAGTGCTCTGATGGAAACTGCATCC
ATGGCAGCCGGCAGTGTGACCGGGAATATGACTGCAAGGACATGAGCGATGAAGTTGGC
TGCGTTAATGTGACACTCTGCGAGGGACCCAACAAGTTCAAGTGTCACAGCGGCGAATG
CATCACCCTGGACAAAGTCTGCAACATGGCTAGAGACTGCCGGGACTGGTCAGATGAAC
CCATCAAAGAGTGCGGGACCAACGAATGCTTGGACAACAACGGCGGCTGTTCCCACGTC
TGCAATGACCTTAAGATCGGCTACGAGTGCCTGTGCCCCGACGGCTTCCAGCTGGTGGCC
CAGCGAAGATGCGAAGATATCGATGAGTGTCAGGATCCCGACACCTGCAGCCAGCTCTG
CGTGAACCTGGAGGGTGGCTACAAGTGCCAGTGTGAGGAAGGCTTCCAGCTGGACCCCC
ACACGAAGGCCTGCAAGGCTGTGGGCTCCATCGCCTACCTCTTCTTCACCAACCGGCACG
AGGTCAGGAAGATGACGCTGGACCGGAGCGAGTACACCAGCCTCATCCCCAACCTGAGG
AACGTGGTCGCTCTGGACACGGAGGTGGCCAGCAATAGAATCTACTGGTCTGACCTGTCC
CAGAGAATGATCTGCAGCACCCAGCTTGACAGAGCCCACGGCGTCTCTTCCTATGACACC
GTCATCAGCAGAGACATCCAGGCCCCCGACGGGCTGGCTGTGGACTGGATCCACAGCAA
CATCTACTGGACCGACTCTGTCCTGGGCACTGTCTCTGTTGCGGATACCAAGGGCGTGAA
GAGGAAAACGTTATTCAGGGAGAACGGCTCCAAGCCAAGGGCCATCGTGGTGGATCCTG
TTCATGGCTTCATGTACTGGACTGACTGGGGAACTCCCGCCAAGATCAAGAAAGGGGGC
CTGAATGGTGTGGACATCTACTCGCTGGTGACTGAAAACATTCAGTGGCCCAATGGCATC
ACCCTAGATCTCCTCAGTGGCCGCCTCTACTGGGTTGACTCCAAACTTCACTCCATCTCAA
GCATCGATGTCAACGGGGGCAACCGGAAGACCATCTTGGAGGATGAAAAGAGGCTGGCC
CACCCCTTCTCCTTGGCCGTCTTTGAGGACAAAGTATTTTGGACAGATATCATCAACGAA
GCCATTTTCAGTGCCAACCGCCTCACAGGTTCCGATGTCAACTTGTTGGCTGAAAACCTA
CTGTCCCCAGAGGATATGGTTCTCTTCCACAACCTCACCCAGCCAAGAGGAGTGAACTGG
TGTGAGAGGACCACCCTGAGCAATGGCGGCTGCCAGTATCTGTGCCTCCCTGCCCCGCAG
ATCAACCCCCACTCGCCCAAGTTTACCTGCGCCTGCCCGGACGGCATGCTGCTGGCCAGG
GACATGAGGAGCTGCCTCACAGAGGCTGAGGCTGCAGTGGCCACCCAGGAGACATCCAC
CGTCAGGCTAAAGGTCAGCTCCACAGCCGTAAGGACACAGCACACAACCACCCGACCTG
TTCCCGACACCTCCCGGCTGCCTGGGGCCACCCCTGGGCTCACCACGGTGGAGATAGTGA
CAATGTCTCACCAAGTGCTCCTCGTCTTCCTTTGCCTGGGGGTCTTCCTTCTATGGAAGAA
CTGGCGGCTTAAGAACATCAACAGCATCAACTTTGACAACCCCGTCTATCAGAAGACCA
CAGAGGATGAGGTCCACATTTGCCACAACCAGGACGGCTACAGCTACCCCTCGAGACAG
ATGGTCAGTCTGGAGGATGACGTGGCGTGAACATCTGCCTGGAGTCCCGTCCCTGCCCAG
AACCCTTCCTGAGACCTCGCCGGCCTTGTTTTATTCAAAGACAGAGAAGACCAAAGCATT
GCCTGCCAGAGCTTTGTTTTATATATTTATTCATCTGGGAGGCAGAACAGGCTTCGGACA
GTGCCCATGCAATGGCTTGGGTTGGGATTTTGGTTTCTTCCTTTCCTCGTGAAGGATAAGA
GAAACAGGCCCGGGGGGACCAGGATGACACCTCCATTTCTCTCCAGGAAGTTTTGAGTTT
CTCTCCACCGTGACACAATCCTCAAACATGGAAGATGAAAGGGGAGGGGATGTCAGGCC
CAGAGAAGCAAGTGGCTTTCAACACACAACAGCAGATGGCACCAACGGGACCCCCTGGC
CCTGCCTCATCCACCAATCTCTAAGCCAAACCCCTAAACTCAGGAGTCAACGTGTTTACC
TCTTCTATGCAAGCCTTGCTAGACAGCCAGGTTAGCCTTTGCCCTGTCACCCCCGAATCAT
GACCCACCCAGTGTCTTTCGAGGTGGGTTTGTACCTTCCTTAAGCCAGGAAAGGGATTCA
TGGCGTCGGAAATGATCTGGCTGAATCCGTGGTGGCACCGAGACCAAACTCATTCACCA
AATGATGCCACTTCCCAGAGGCAGAGCCTGAGTCACTGGTCACCCTTAATATTTATTAAG
TGCCTGAGACACCCGGTTACCTTGGCCGTGAGGACACGTGGCCTGCACCCAGGTGTGGCT
GTCAGGACACCAGCCTGGTGCCCATCCTCCCGACCCCTACCCACTTCCATTCCCGTGGTC
TCCTTGCACTTTCTCAGTTCAGAGTTGTACACTGTGTACATTTGGCATTTGTGTTATTATTT
TGCACTGTTTTCTGTCGTGTGTGTTGGGATGGGATCCCAGGCCAGGGAAAGCCCGTGTCA
ATGAATGCCGGGGACAGAGAGGGGCAGGTTGACCGGGACTTCAAAGCCGTGATCGTGAA
TATCGAGAACTGCCATTGTCGTCTTTATGTCCGCCCACCTAGTGCTTCCACTTCTATGCAA
ATGCCTCCAAGCCATTCACTTCCCCAATCTTGTCGTTGATGGGTATGTGTTTAAAACATGC
ACGGTGAGGCCGGGCGCAGTGGCTCACGCCTGTAATCCCAGCACTTTGGGAGGCCGAGG
CGGGTGGATCATGAGGTCAGGAGATCGAGACCATCCTGGCTAACACGTGAAACCCCGTC
TCTACTAAAAATACAAAAAATTAGCCGGGCGTGGTGGCGGGCACCTGTAGTCCCAGCTA
CTCGGGAGGCTGAGGCAGGAGAATGGTGTGAACCCGGGAAGCGGAGCTTGCAGTGAGC
CGAGATTGCGCCACTGCAGTCCGCAGTCTGGCCTGGGCGACAGAGCGAGACTCCGTCTC
AAAAAAAAAAAACAAAAAAAAACCATGCATGGTGCATCAGCAGCCCATGGCCTCTGGCC
AGGCATGGCGAGGCTGAGGTGGGAGGATGGTTTGAGCTCAGGCATTTGAGGCTGTCGTG
AGCTATGATTATGCCACTGCTTTCCAGCCTGGGCAACATAGTAAGACCCCATCTCTTAAA
AAATGAATTTGGCCAGACACAGGTGCCTCACGCCTGTAATCCCAGCACTTTGGGAGGCTG
AGCTGGATCACTTGAGTTCAGGAGTTGGAGACCAGGCCTGAGCAACAAAGCGAGATCCC
ATCTCTACAAAAACCAAAAAGTTAAAAATCAGCTGGGTACGGTGGCACGTGCCTGTGAT
CCCAGCTACTTGGGAGGCTGAGGCAGGAGGATCGCCTGAGCCCAGGAGGTGGAGGTTGC
AGTGAGCCATGATCGAGCCACTGCACTCCAGCCTGGGCAACAGATGAAGACCCTATTTC
AGAAATACAACTATAAAAAAATAAATAAATCCTCCAGTCTGGATCGTTTGACGGGACTT
CAGGTTCTTTCTGAAATCGCCGTGTTACTGTTGCACTGATGTCCGGAGAGACAGTGACAG
CCTCCGTCAGACTCCCGCGTGAAGATGTCACAAGGGATTGGCAATTGTCCCCAGGGACA
AAACACTGTGTCCCCCCCAGTGCAGGGAACCGTGATAAGCCTTTCTGGTTTCGGAGCACG
TAAATGCGTCCCTGTACAGATAGTGGGGATTTTTTGTTATGTTTGCACTTTGTATATTGGT
TGAAACTGTTATCACTTATATATATATATATACACACATATATATAAAATCTATTTATTTT
TGCAAACCCTGGTTGCTGTATTTGTTCAGTGACTATTCTCGGGGCCCTGTGTAGGGGGTT
ATTGCCTCTGAAATGCCTCTTCTTTATGTACAAAGATTATTTGCACGAACTGGACTGTGTG
CAACGCTTTTTGGGAGAATGATGTCCCCGTTGTATGTATGAGTGGCTTCTGGGAGATGGG
TGTCACTTTTTAAACCACTGTATAGAAGGTTTTTGTAGCCTGAATGTCTTACTGTGATCAA
TTAAATTTCTTAAATGAACCAA.

[0136] In some embodiments, binding to low-density lipoprotein receptor (LDLR) is blocked by a composition comprising an agent that blocks low-density lipoprotein (LDL) binding to LDLR and/or that prevents LNP uptake into liver cells or tissue. In some embodiments, the LDLR comprises an amino acid sequence that is at least 85%, 90%, 91%, 92%, 93%, 94%, 95%, 96%, 97%, 98%, 99% or 100% identical to the sequence of SEQ ID NO: 353. SEQ ID NO: 353:

MGPWGWKLRWTVALLLAAAGTAVGDRCERNEFQCQDGKCISYKWVCDGSAECQDGSDES
QETCLSVTCKSGDFSCGGRVNRCIPQFWRCDGQVDCDNGSDEQGCPPKTCSQDEFRCHDGK
CISRQFVCDSDRDCLDGSDEASCPVLTCGPASFQCNSSTCIPQLWACDNDPDCEDGSDEWPQ
RCRGLYVFQGDSSPCSAFEFHCLSGECIHSSWRCDGGPDCKDKSDEENCAVATCRPDEFQCS
DGNCIHGSRQCDREYDCKDMSDEVGCVNVTLCEGPNKFKCHSGECITLDKVCNMARDCRD
WSDEPIKECGTNECLDNNGGCSHVCNDLKIGYECLCPDGFQLVAQRRCEDIDECQDPDTCSQ
LCVNLEGGYKCQCEEGFQLDPHTKACKAVGSIAYLFFTNRHEVRKMTLDRSEYTSLIPNLRN
VVALDTEVASNRIYWSDLSQRMICSTQLDRAHGVSSYDTVISRDIQAPDGLAVDWIHSNIYW
TDSVLGTVSVADTKGVKRKTLFRENGSKPRAIVVDPVHGFMYWTDWGTPAKIKKGGLNGV
DIYSLVTENIQWPNGITLDLLSGRLYWVDSKLHSISSIDVNGGNRKTILEDEKRLAHPFSLAVF
EDKVFWTDIINEAIFSANRLTGSDVNLLAENLLSPEDMVLFHNLTQPRGVNWCERTTLSNGG
CQYLCLPAPQINPHSPKFTCACPDGMLLARDMRSCLTEAEAAVATQETSTVRLKVSSTAVRT
QHTTTRPVPDTSRLPGATPGLTTVEIVTMSHQALGDVAGRGNEKKPSSVRALSIVLPIATELG
LWSRGQLCDRACLSLQCSSSSFAWGSSFYGRTGGLRTSTASTLTTPSIRRPQRMRSTFATTRT
ATATPRDRWSVWRMTWREHLPGVPSLPRTLPETSPALFYSKTEKTKALPARALFYIFIHLGGR
TGFGQCPCNGLGWDFGFFLSS.

[0137] In some embodiments, binding to low-density lipoprotein receptor (LDLR) is blocked by a composition comprising an agent that blocks low-density lipoprotein (LDL) binding to LDLR and/or that prevents LNP uptake into liver cells or tissue. In some embodiments, the LDLR comprises an amino acid sequence that is at least 85%, 90%, 91%, 92%, 93%, 94%, 95%, 96%, 97%, 98%, 99% or 100% identical to the sequence of SEQ ID NO: 354. SEQ ID NO: 354:

MGPWGWKLRWTVALLLAAAGTAVGDRCERNEFQCQDGKCISYKWVCDGSAECQDGSDES
QETCLSVTCKSGDFSCGGRVNRCIPQFWRCDGQVDCDNGSDEQGCPPKTCSQDEFRCHDGK
CISRQFVCDSDRDCLDGSDEASCPVLTCGPASFQCNSSTCIPQLWACDNDPDCEDGSDEWPQ
RCRGLYVFQGDSSPCSAFEFHCLSGECIHSSWRCDGGPDCKDKSDEENCAVATCRPDEFQCS
DGNCIHGSRQCDREYDCKDMSDEVGCVNVTLCEGPNKFKCHSGECITLDKVCNMARDCRD
WSDEPIKECGTNECLDNNGGCSHVCNDLKIGYECLCPDGFQLVAQRRCEDIDECQDPDTCSQ
LCVNLEGGYKCQCEEGFQLDPHTKACKAVGSIAYLFFTNRHEVRKMTLDRSEYTSLIPNLRN
VVALDTEVASNRIYWSDLSQRMICSTQLDRAHGVSSYDTVISRDIQAPDGLAVDWIHSNIYW
TDSVLGTVSVADTKGVKRKTLFRENGSKPRAIVVDPVHGFMYWTDWGTPAKIKKGGLNGV
DIYSLVTENIQWPNGITLDLLSGRLYWVDSKLHSISSIDVNGGNRKTILEDEKRLAHPFSLAVF
EDKVFWTDIINEAIFSANRLTGSDVNLLAENLLSPEDMVLFHNLTQPRGVNWCERTTLSNGG
CQYLCLPAPQINPHSPKFTCACPDGMLLARDMRSCLTEAEAAVATQETSTVRLKVSSTAVRT
QHTTTRPVPDTSRLPGATPGLTTVEIVTMSHQALGDVAGRGNEKKPSSVRALSIVLPIVLLVFL
CLGVFLLWKNWRLKNINSINFDNPVYQKTTEDEVHICHNQDGYSYPSMVSLEDDVA.

[0138] In some embodiments, binding to low-density lipoprotein receptor (LDLR) is blocked by a composition comprising an agent that blocks low-density lipoprotein (LDL) binding to LDLR and/or that prevents LNP uptake into liver cells or tissue. In some embodiments, the LDLR comprises an amino acid sequence that is at least 85%, 90%, 91%, 92%, 93%, 94%, 95%, 96%, 97%, 98%, 99% or 100% identical to the sequence of SEQ ID NO: 355. SEQ ID NO: 355:

MGPWGWKLRWTVALLLAAAGTAVGDRCERNEFQCQDGKCISYKWVCDGSAECQDGSDES
QETCLSVTCKSGDFSCGGRVNRCIPQFWRCDGQVDCDNGSDEQGCPPKTCSQDEFRCHDGK
CISRQFVCDSDRDCLDGSDEASCPVLTCGPASFQCNSSTCIPQLWACDNDPDCEDGSDEWPQ
RCRGLYVFQGDSSPCSAFEFHCLSGECIHSSWRCDGGPDCKDKSDEENCAVATCRPDEFQCS
DGNCIHGSRQCDREYDCKDMSDEVGCVNVTLCEGPNKFKCHSGECITLDKVCNMARDCRD
WSDEPIKECGTNECLDNNGGCSHVCNDLKIGYECLCPDGFQLVAQRRCEDIDECQDPDTCSQ
LCVNLEGGYKCQCEEGFQLDPHTKACKAVGSIAYLFFTNRHEVRKMTLDRSEYTSLIPNLRN
VVALDTEVASNRIYWSDLSQRMICSTQLDRAHGVSSYDTVISRDIQAPDGLAVDWIHSNIYW
TDSVLGTVSVADTKGVKRKTLFRENGSKPRAIVVDPVHGFMYWTDWGTPAKIKKGGLNGV
DIYSLVTENIQWPNGITLDLLSGRLYWVDSKLHSISSIDVNGGNRKTILEDEKRLAHPFSLAVF
EDKVFWTDIINEAIFSANRLTGSDVNLLAENLLSPEDMVLFHNLTQPRGVNWCERTTLSNGG
CQYLCLPAPQINPHSPKFTCACPDGMLLARDMRSCLTEAEAAVATQETSTVRLKVSSTAVRT
QHTTTRPVPDTSRLPGATPGLTTVEIVTMSHQVLLVFLCLGVFLLWKNWRLKNINSINFDNPV
YQKTTEDEVHICHNQDGYSYPSRQMVSLEDDVA.

[0139] In some embodiments, the agent, e.g., RNAi molecule and/or composition disclosed herein comprises an siRNA that is capable of knocking down LDLR. In some embodiments, the siRNA comprises a ribonucleotide sequence at least 80% identical to a ribonucleotide sequence from the LDLR. Preferably, the siRNA is at least 90%, 95%, 96%, 97%, 98%, 99% or 100% identical to the ribonucleotide sequence of the target. In some embodiments, the siRNA is 100% identical to the nucleotide sequence of the target. However, siRNA molecules with insertions, deletions or single point mutations relative to a target may also be effective. In some embodiments, the siRNA comprises a single strand. In some embodiments, the siRNA comprises a duplex siRNA. In some embodiments, the siRNA comprises a duplex siRNA comprising a sense (“passenger”) and antisense (“guide”) strand. In some embodiments, the siRNA targets LDLR in the liver. Tools to assist siRNA design are readily available to the public and are known in the art.

[0140] In some embodiments, the composition comprises an RNAi molecule that is between 18-31 nucleotides in length. In some embodiments, the RNAi (e.g., siRNA) is between 19-27 nucleotides in length. In some embodiments, the RNAi (e.g., siRNA) is between 19-25 nucleotides in length. In some embodiments, the RNAi (e.g., siRNA) is between 19-23 nucleotides in length. In some embodiments, the RNAi (e.g., siRNA) is between 19-21 nucleotides in length. In some embodiments, the RNAi (e.g., siRNA) is no more than 21, 25, or 31 nucleotides in length. In some embodiments, the RNAi (e.g., siRNA) is 21 nucleotides in length. In some embodiments, the RNAi is siRNA and comprises the sequence of any of the sequences in Table 3A (SEQ ID NOs: 4300-9964). In some embodiments, the RNA is siRNA and comprises the sequence of any one of SEQ ID NOs: 4300-4309 or 9965-9974. In some embodiments, the RNAi is a duplex siRNA and comprises a pair of sequences of any one of SEQ ID NOs: 4300 and 9965, 4301 and 9966, 4302 and 9967, 4303 and 9968, 4304 and 9969, 4305 and 9970, 4306 and 9971, 4307 and 9972, 4308 and 9973, or 4309 and 9974. In some embodiments, the siRNA comprises no more than and no fewer than 19 contiguous nucleotides of any of the sequences in Table 3A or 3B. In some embodiments, the siRNA comprises no more than and no fewer than 19 contiguous nucleotides of any of the sequences of any one of SEQ ID NOs: 4300-4309 or 9965-9974. In some embodiments, the RNAi is a duplex siRNA and comprises a pair of sequences wherein each sequence comprises no more than and no fewer than 19 contiguous nucleotides of any of the sequences of SEQ ID NOs: 4300 and 9965, 4301 and 9966, 4302 and 9967, 4303 and 9968, 4304 and 9969, 4305 and 9970, 4306 and 9971, 4307 and 9972, 4308 and 9973, or 4309 and 9974. In some embodiments, the siRNA comprises no more than and no fewer than 20 contiguous nucleotides of any of the sequences in Table 3A or 3B. In some embodiments, the siRNA comprises no more than and no fewer than 20 contiguous nucleotides of any of the sequences of any one of SEQ ID NOs: 4300-4309 or 9965-9974. In some embodiments, the RNAi is a duplex siRNA and comprises a pair of sequences wherein each sequence comprises no more than and no fewer than 20 contiguous nucleotides of any of the sequences of SEQ ID NOs: 4300 and 9965, 4301 and 9966, 4302 and 9967, 4303 and 9968, 4304 and 9969, 4305 and 9970, 4306 and 9971, 4307 and 9972, 4308 and 9973, or 4309 and 9974. In some embodiments, the siRNA comprises no more than and no fewer than 21 contiguous nucleotides of any of the sequences in Table 3A or 3B. In some embodiments, the siRNA comprises no more than and no fewer than 21 contiguous nucleotides of any of the sequences of any one of SEQ ID NOs: 4300-4309 or 9965-9974. In some embodiments, the RNAi is a duplex siRNA and comprises a pair of sequences wherein each sequence comprises no more than and no fewer than 21 contiguous nucleotides of any of the sequences of SEQ ID NOs: 4300 and 9965, 4301 and 9966, 4302 and 9967, 4303 and 9968, 4304 and 9969, 4305 and 9970, 4306 and 9971, 4307 and 9972, 4308 and 9973, or 4309 and 9974. SEQ ID NOs: 4300-9964 in Table 3A reflect exemplary sequences for the sense or antisense 5′ to 3′ strands of siRNA.

[0141] In some embodiments the composition comprises a RNAi molecule (e.g., siRNA) that comprises between 13-21 consecutive nucleic acids of any one of the nucleic acid sequences in Table 3A or 3B. In some embodiments, the RNAi (e.g., siRNA) comprises between 14-21 consecutive nucleic acids of any one of the nucleic acid sequences in Table 3. In some embodiments, the RNAi (e.g., siRNA) comprises a sequence that is at least 80%, 85%, 90%, 91%, 92%, 93%, 94%, 95%, 96%, 97%, 98%, 99% or 100% identical to any one of the nucleic acid sequences of Table 3A or 3B. In some embodiments, the RNAi (e.g., siRNA) comprises a sequence that is at least 80%, 85%, 90%, 91%, 92%, 93%, 94%, 95%, 96%, 97%, 98%, 99% or 100% identical to any one of SEQ ID NOs: 4300-4309 or 9965-9974. In some embodiments, the RNAi (e.g., siRNA) comprises a pair of sequences wherein each sequence is at least 80%, 85%, 90%, 91%, 92%, 93%, 94%, 95%, 96%, 97%, 98%, 99% or 100% identical to each nucleic acid sequence of the pair of SEQ ID NOs: 4300 and 9965, 4301 and 9966, 4302 and 9967, 4303 and 9968, 4304 and 9969, 4305 and 9970, 4306 and 9971, 4307 and 9972, 4308 and 9973, or 4309 and 9974. In some embodiments, the RNAi (e.g., siRNA) comprises at least 13, at least 14, at least 15, at least 16, at least 17, at least 18, at least 19, at least 20, or at least 21 consecutive nucleic acids of a sequence that is at least 80%, 85%, 90%, 91%, 92%, 93%, 94%, 95%, 96%, 97%, 98%, 99% or 100% identical to any one of the nucleic acid sequences of Table 3A or 3B. In some embodiments, the RNAi (e.g., siRNA) comprises at least 13, at least 14, at least 15, at least 16, at least 17, at least 18, at least 19, at least 20, or at least 21 consecutive nucleic acids of a sequence that is at least 80%, 85%, 90%, 91%, 92%, 93%, 94%, 95%, 96%, 97%, 98%, 99% or 100% identical to any one of SEQ ID NOs: 4300-4309 or 9965-9974. In some embodiments, the RNAi (e.g., siRNA) comprises a pair of sequences wherein each sequence comprises at least 13, at least 14, at least 15, at least 16, at least 17, at least 18, at least 19, at least 20, or at least 21 consecutive nucleic acids of a sequence that is at least 80%, 85%, 90%, 91%, 92%, 93%, 94%, 95%, 96%, 97%, 98%, 99% or 100% identical to each nucleic acid sequence of the pair of SEQ ID NOs: 4300 and 9965, 4301 and 9966, 4302 and 9967, 4303 and 9968, 4304 and 9969, 4305 and 9970, 4306 and 9971, 4307 and 9972, 4308 and 9973, or 4309 and 9974. In some embodiments, the RNAi (e.g., siRNA) comprises at least 13, at least 14, at least 15, at least 16, at least 17, at least 18, at least 19, at least 20, or at least 21 consecutive nucleic acids of a sequence that is identical to any one of the nucleic acid sequences of Table 3A or 3B. In some embodiments, the RNAi (e.g., siRNA) comprises at least 13, at least 14, at least 15, at least 16, at least 17, at least 18, at least 19, at least 20, or at least 21 consecutive nucleic acids of a sequence that is identical to any one of SEQ ID NOs: 4300-4309 or 9965-9974. In some embodiments, the RNAi (e.g., siRNA) comprises a pair of sequences wherein each sequence comprises at least 13, at least 14, at least 15, at least 16, at least 17, at least 18, at least 19, at least 20, or at least 21 consecutive nucleic acids of a sequence that is identical to each nucleic acid sequence of the pair of SEQ ID NOs: 4300 and 9965, 4301 and 9966, 4302 and 9967, 4303 and 9968, 4304 and 9969, 4305 and 9970, 4306 and 9971, 4307 and 9972, 4308 and 9973, or 4309 and 9974. In some embodiments, the RNAi (e.g., siRNA) targets 13-19, 13-20, 13-21, 13-22, 13-23, 13-24, 13-25, 14-19, 14-20, 14-21, 14-22, 14-23, 14-24, or 14-25 consecutive nucleic acids of a sequence that is at least 80%, 85%, 90%, 91%, 92%, 93%, 94%, 95%, 96%, 97%, 98%, 99% or 100% identical to any one of the nucleic acid sequences of Table 3A or 3B. In some embodiments, the RNAi (e.g., siRNA) targets 13-19, 13-20, 13-21, 13-22, 13-23, 13-24, 13-25, 14-19, 14-20, 14-21, 14-22, 14-23, 14-24, or 14-25 consecutive nucleic acids of a sequence that is at least 80%, 85%, 90%, 91%, 92%, 93%, 94%, 95%, 96%, 97%, 98%, 99% or 100% identical to any one of the nucleic acid sequences of SEQ ID NOs: 4300-4309 or SEQ ID NOs: 9965-9974. In some embodiments, the RNAi (e.g., siRNA) comprises a pair of sequences wherein each sequence targets 13-19, 13-20, 13-21, 13-22, 13-23, 13-24, 13-25, 14-19, 14-20, 14-21, 14-22, 14-23, 14-24, or 14-25 consecutive nucleic acids of a sequence that is at least 80%, 85%, 90%, 91%, 92%, 93%, 94%, 95%, 96%, 97%, 98%, 99% or 100% identical to each nucleic acid sequence of the pair of SEQ ID NOs: 4300 and 9965, 4301 and 9966, 4302 and 9967, 4303 and 9968, 4304 and 9969, 4305 and 9970, 4306 and 9971, 4307 and 9972, 4308 and 9973, or 4309 and 9974. In some embodiments, the RNAi (e.g., siRNA) comprises 13-19, 13-20, 13-21, 13-22, 13-23, 13-24, 13-25, 14-19, 14-20, 14-21, 14-22, 14-23, 14-24, or 14-25 consecutive nucleic acids of a sequence that is at least 80%, 85%, 90%, 91%, 92%, 93%, 94%, 95%, 96%, 97%, 98%, 99% or 100% identical to SEQ ID NO: 4300. In some embodiments, the RNAi (e.g., siRNA) comprises 13-19, 13-20, 13-21, 13-22, 13-23, 13-24, 13-25, 14-19, 14-20, 14-21, 14-22, 14-23, 14-24, or 14-25 consecutive nucleic acids of a sequence that is at least 80%, 85%, 90%, 91%, 92%, 93%, 94%, 95%, 96%, 97%, 98%, 99% or 100% identical to SEQ ID NO: 4301. In some embodiments, the RNAi (e.g., siRNA) comprises 13-19, 13-20, 13-21, 13-22, 13-23, 13-24, 13-25, 14-19, 14-20, 14-21, 14-22, 14-23, 14-24, or 14-25 consecutive nucleic acids of a sequence that is at least 80%, 85%, 90%, 91%, 92%, 93%, 94%, 95%, 96%, 97%, 98%, 99% or 100% identical to SEQ ID NO: 4302. In some embodiments, the RNAi (e.g., siRNA) comprises 13-19, 13-20, 13-21, 13-22, 13-23, 13-24, 13-25, 14-19, 14-20, 14-21, 14-22, 14-23, 14-24, or 14-25 consecutive nucleic acids of a sequence that is at least 80%, 85%, 90%, 91%, 92%, 93%, 94%, 95%, 96%, 97%, 98%, 99% or 100% identical to SEQ ID NO: 4303. In some embodiments, the RNAi (e.g., siRNA) comprises 13-19, 13-20, 13-21, 13-22, 13-23, 13-24, 13-25, 14-19, 14-20, 14-21, 14-22, 14-23, 14-24, or 14-25 consecutive nucleic acids of a sequence that is at least 80%, 85%, 90%, 91%, 92%, 93%, 94%, 95%, 96%, 97%, 98%, 99% or 100% identical to SEQ ID NO: 4304. In some embodiments, the RNAi (e.g., siRNA) comprises 13-19, 13-20, 13-21, 13-22, 13-23, 13-24, 13-25, 14-19, 14-20, 14-21, 14-22, 14-23, 14-24, or 14-25 consecutive nucleic acids of a sequence that is at least 80%, 85%, 90%, 91%, 92%, 93%, 94%, 95%, 96%, 97%, 98%, 99% or 100% identical to SEQ ID NO: 4305. In some embodiments, the RNAi (e.g., siRNA) comprises 13-19, 13-20, 13-21, 13-22, 13-23, 13-24, 13-25, 14-19, 14-20, 14-21, 14-22, 14-23, 14-24, or 14-25 consecutive nucleic acids of a sequence that is at least 80%, 85%, 90%, 91%, 92%, 93%, 94%, 95%, 96%, 97%, 98%, 99% or 100% identical to SEQ ID NO: 4306. In some embodiments, the RNAi (e.g., siRNA) comprises 13-19, 13-20, 13-21, 13-22, 13-23, 13-24, 13-25, 14-19, 14-20, 14-21, 14-22, 14-23, 14-24, or 14-25 consecutive nucleic acids of a sequence that is at least 80%, 85%, 90%, 91%, 92%, 93%, 94%, 95%, 96%, 97%, 98%, 99% or 100% identical to SEQ ID NO: 4307. In some embodiments, the RNAi (e.g., siRNA) comprises 13-19, 13-20, 13-21, 13-22, 13-23, 13-24, 13-25, 14-19, 14-20, 14-21, 14-22, 14-23, 14-24, or 14-25 consecutive nucleic acids of a sequence that is at least 80%, 85%, 90%, 91%, 92%, 93%, 94%, 95%, 96%, 97%, 98%, 99% or 100% identical to SEQ ID NO: 4308. In some embodiments, the RNAi (e.g., siRNA) comprises 13-19, 13-20, 13-21, 13-22, 13-23, 13-24, 13-25, 14-19, 14-20, 14-21, 14-22, 14-23, 14-24, or 14-25 consecutive nucleic acids of a sequence that is at least 80%, 85%, 90%, 91%, 92%, 93%, 94%, 95%, 96%, 97%, 98%, 99% or 100% identical to SEQ ID NO: 4309. In some embodiments, the RNAi (e.g., siRNA) comprises 13-19, 13-20, 13-21, 13-22, 13-23, 13-24, 13-25, 14-19, 14-20, 14-21, 14-22, 14-23, 14-24, or 14-25 consecutive nucleic acids of a sequence that is at least 80%, 85%, 90%, 91%, 92%, 93%, 94%, 95%, 96%, 97%, 98%, 99% or 100% identical to SEQ ID NO: 9965. In some embodiments, the RNAi (e.g., siRNA) comprises 13-19, 13-20, 13-21, 13-22, 13-23, 13-24, 13-25, 14-19, 14-20, 14-21, 14-22, 14-23, 14-24, or 14-25 consecutive nucleic acids of a sequence that is at least 80%, 85%, 90%, 91%, 92%, 93%, 94%, 95%, 96%, 97%, 98%, 99% or 100% identical to SEQ ID NO: 9966. In some embodiments, the RNAi (e.g., siRNA) comprises 13-19, 13-20, 13-21, 13-22, 13-23, 13-24, 13-25, 14-19, 14-20, 14-21, 14-22, 14-23, 14-24, or 14-25 consecutive nucleic acids of a sequence that is at least 80%, 85%, 90%, 91%, 92%, 93%, 94%, 95%, 96%, 97%, 98%, 99% or 100% identical to SEQ ID NO: 9967. In some embodiments, the RNAi (e.g., siRNA) comprises 13-19, 13-20, 13-21, 13-22, 13-23, 13-24, 13-25, 14-19, 14-20, 14-21, 14-22, 14-23, 14-24, or 14-25 consecutive nucleic acids of a sequence that is at least 80%, 85%, 90%, 91%, 92%, 93%, 94%, 95%, 96%, 97%, 98%, 99% or 100% identical to SEQ ID NO: 9968. In some embodiments, the RNAi (e.g., siRNA) comprises 13-19, 13-20, 13-21, 13-22, 13-23, 13-24, 13-25, 14-19, 14-20, 14-21, 14-22, 14-23, 14-24, or 14-25 consecutive nucleic acids of a sequence that is at least 80%, 85%, 90%, 91%, 92%, 93%, 94%, 95%, 96%, 97%, 98%, 99% or 100% identical to SEQ ID NO: 9969. In some embodiments, the RNAi (e.g., siRNA) comprises 13-19, 13-20, 13-21, 13-22, 13-23, 13-24, 13-25, 14-19, 14-20, 14-21, 14-22, 14-23, 14-24, or 14-25 consecutive nucleic acids of a sequence that is at least 80%, 85%, 90%, 91%, 92%, 93%, 94%, 95%, 96%, 97%, 98%, 99% or 100% identical to SEQ ID NO: 9970. In some embodiments, the RNAi (e.g., siRNA) comprises 13-19, 13-20, 13-21, 13-22, 13-23, 13-24, 13-25, 14-19, 14-20, 14-21, 14-22, 14-23, 14-24, or 14-25 consecutive nucleic acids of a sequence that is at least 80%, 85%, 90%, 91%, 92%, 93%, 94%, 95%, 96%, 97%, 98%, 99% or 100% identical to SEQ ID NO: 9971. In some embodiments, the RNAi (e.g., siRNA) comprises 13-19, 13-20, 13-21, 13-22, 13-23, 13-24, 13-25, 14-19, 14-20, 14-21, 14-22, 14-23, 14-24, or 14-25 consecutive nucleic acids of a sequence that is at least 80%, 85%, 90%, 91%, 92%, 93%, 94%, 95%, 96%, 97%, 98%, 99% or 100% identical to SEQ ID NO: 9972. In some embodiments, the RNAi (e.g., siRNA) comprises 13-19, 13-20, 13-21, 13-22, 13-23, 13-24, 13-25, 14-19, 14-20, 14-21, 14-22, 14-23, 14-24, or 14-25 consecutive nucleic acids of a sequence that is at least 80%, 85%, 90%, 91%, 92%, 93%, 94%, 95%, 96%, 97%, 98%, 99% or 100% identical to SEQ ID NO: 9973. In some embodiments, the RNAi (e.g., siRNA) comprises 13-19, 13-20, 13-21, 13-22, 13-23, 13-24, 13-25, 14-19, 14-20, 14-21, 14-22, 14-23, 14-24, or 14-25 consecutive nucleic acids of a sequence that is at least 80%, 85%, 90%, 91%, 92%, 93%, 94%, 95%, 96%, 97%, 98%, 99% or 100% identical to SEQ ID NO: 9974.

[0142] In some embodiments, the LDLR-encoding transcript comprises a sequence that is at least 80%, 85%, 90%, 91%, 92%, 93%, 94%, 95%, 96%, 97%, 98%, 99% or 100% identical to the sequence of SEQ ID NO: 350, or a reverse complement thereof. In some embodiments, the RNAi (e.g., siRNA) targets 19, 20, 21, 22, 23, 24, 25, 26, 27, 28, 29, 30, 31 or 32 contiguous nucleotides of a sequence that is at least 80%, 85%, 90%, 91%, 92%, 93%, 94%, 95%, 96%, 97%, 98%, 99% or 100% identical to the sequence of SEQ ID NO: 350, or a reverse complement thereof. In some embodiments, the RNAi (e.g., siRNA) targets 19-32, 19-25, 19-22, or 20-21 contiguous nucleotides of a sequence that is at least 80%, 85%, 90%, 91%, 92%, 93%, 94%, 95%, 96%, 97%, 98%, 99% or 100% identical to the sequence of SEQ ID NO: 350, or a reverse complement thereof.

[0143] In some embodiments, the LDLR-encoding transcript comprises a sequence that is at least 80%, 85%, 90%, 91%, 92%, 93%, 94%, 95%, 96%, 97%, 98%, 99% or 100% identical to the sequence of SEQ ID NO: 351, or a reverse complement thereof. In some embodiments, the RNAi molecule targets 19, 20, 21, 22, 23, 24, 25, 26, 27, 28, 29, 30, 31 or 32 contiguous nucleotides of a sequence that is at least 80%, 85%, 90%, 91%, 92%, 93%, 94%, 95%, 96%, 97%, 98%, 99% or 100% identical to the sequence of SEQ ID NO: 351, or a reverse complement thereof. In some embodiments, the RNAi molecule targets 19-32, 19-25, 19-22, or 20-21 contiguous nucleotides of a sequence that is at least 80%, 85%, 90%, 91%, 92%, 93%, 94%, 95%, 96%, 97%, 98%, 99% or 100% identical to the sequence of SEQ ID NO: 351, or a reverse complement thereof.

[0144] In some embodiments, the LDLR-encoding transcript comprises a sequence that is at least 80%, 85%, 90%, 91%, 92%, 93%, 94%, 95%, 96%, 97%, 98%, 99% or 100% identical to the sequence of SEQ ID NO: 352, or a reverse complement thereof. In some embodiments, the RNAi molecule targets 19, 20, 21, 22, 23, 24, 25, 26, 27, 28, 29, 30, 31 or 32 contiguous nucleotides of a sequence that is at least 80%, 85%, 90%, 91%, 92%, 93%, 94%, 95%, 96%, 97%, 98%, 99% or 100% identical to the sequence of SEQ ID NO: 352, or a reverse complement thereof. In some embodiments, the RNAi molecule targets 19-32, 19-25, 19-22, or 20-21 contiguous nucleotides of a sequence that is at least 80%, 85%, 90%, 91%, 92%, 93%, 94%, 95%, 96%, 97%, 98%, 99% or 100% identical to the sequence of SEQ ID NO: 352, or a reverse complement thereof.

[0145] In some embodiments, the RNAi molecule is single-stranded. In some embodiments, the RNAi molecule is double-stranded. It should be noted that, any nucleotide lengths of any RNAi molecules recited in this application refer to a single strand of the RNAi molecule, even if that single strand is a member of a double-stranded RNAi molecule. For example, if an RNAi molecule is 21 nucleotides in length and is double stranded (without overhangs), the molecule would comprise a total of 42 nucleotides (21 nucleotides in each strand). In some embodiments, the RNAi molecule is double stranded and comprises blunt ends. In some embodiments, the RNAi molecule is double-stranded and comprises overhangs of one or more nucleotides. In some embodiments, the RNAi molecule is double stranded for only a portion of the molecule. For example, in some embodiments, a double-stranded RNAi molecule comprises overhangs on the sense and/or antisense strand of 1, 2, 3, 4, or 5 or more nucleotides. In some embodiments, a double-stranded RNAi molecule comprises overhangs on the sense and/or antisense strand of 1, 2 or 3 nucleotides.

[0146] In some embodiments, any of the RNAi molecules (e.g., siRNA) disclosed herein comprises a nucleotide sequence that shares complementarity (e.g., 100% complementarity) with a target sequence in an LDLR RNA transcript. In some embodiments, the RNAi molecule comprises at least 17, 18, 19, 20, or 21 nucleotides that are complementary to a target sequence in an LDLR RNA transcript. In some embodiments, the RNAi molecule comprises at least 17, 18, 19, 20, or 21 nucleotides that are complementary to a target sequence in an LDLR RNA transcript, but wherein one or more nucleotides on the 3′ end of the RNAi molecule are not complementary to the target sequence in the LDLR RNA transcript. In some embodiments, the RNAi molecule comprises at least 17, 18, 19, 20, or 21 nucleotides that are complementary to a target sequence in an LDLR RNA transcript, but wherein one or more nucleotides on the 5′ end of the RNAi molecule are not complementary to the target sequence in the LDLR RNA transcript. In some embodiments, the RNAi molecule comprises at least 17, 18, 19, 20, or 21 nucleotides that are complementary to a target sequence in an LDLR RNA transcript, but wherein one or more nucleotides on the 3′ end and the 5′ end of the RNAi molecule are not complementary to the target sequence in the LDLR RNA transcript.

### B. Antisense Oligonucleotides as Agent

[0147] In some embodiments, antisense oligonucleotides (ASOs) are the agent used to block LDL binding to LDLR in the liver and/or for preventing LNP uptake into liver cells or tissue. The ASOs can be a single or double stranded DNA or RNA, or chimeric mixtures or derivatives or modified versions thereof. As is known in the art, for antisense oligonucleotides to sufficiently inhibit their target sequence as efficiently as possible, there should be a degree of complementarity between the antisense oligonucleotides and the corresponding target sequence. Chemical modifications of ASOs are known in the art to increase their resistance to various nucleases, as well as their binding affinity to RNA targets. Phosphorothioate (PS) modification, in which a non-bridging oxygen is replaced by a sulfur atom in the phosphate backbone; 2′-O-methyl (2′-O-Me), 2′-O-methoxyethyl (MOE) modification; constrained ethyl (cEt) modification; and bicyclic nucleoside modifications such as 2′,4′-methylene bridged nucleic acids, commonly called locked nucleic acid (LNA) modification, are non-limiting examples. Accordingly, in some embodiments, the antisense oligonucleotide comprises a modified sequence. In some embodiments, the ASO contains MOE or LNA modifications.

[0148] In some embodiments, the antisense oligonucleotide is linked to ligands or conjugates known in the art and/or described herein or delivered by non-viral tissue-specific delivery vehicles, which may be used, e.g., to increase the cellular uptake of antisense oligonucleotides.

[0149] In some embodiments, any of the ASOs disclosed herein are administered “naked”, i.e., without a molecule intended for a cell or tissue-specific delivery. For example, in some embodiments, the agent is administered “naked” in a pharmaceutically acceptable buffer, e.g., a buffered saline solution such as PBS.

[0150] In some embodiments, any of the ASOs disclosed herein is at least 14, 15, 16, 17, 18, 19, 20, 21, 22, 23, 24, or 25 nucleotides in length. In some embodiments, any of the ASOs disclosed herein is no more than 35, 34, 33, 32, 31, 30, 29, 28, 27, 26 or 25 nucleotides in length. In some embodiments, any of the ASOs disclosed herein is between 14-35, 14-30, 14-25, 14-20, 20-35, 20-30, 20-25, 25-35, or 25-30 nucleotides in length.

[0151] In some embodiments, the antisense oligonucleotide is administered without conjugation and without a non-viral tissue-specific delivery vehicle. In some embodiments, the antisense oligonucleotides are administered without a non-viral tissue-specific delivery vehicle and are administered in a composition comprising a pharmaceutically acceptable carrier.

[0152] In some embodiments, the antisense oligonucleotide targets an LDLR-encoding transcript. In some embodiments, the LDLR-encoding transcript comprises a sequence that is at least 80%, 85%, 90%, 91%, 92%, 93%, 94%, 95%, 96%, 97%, 98%, 99% or 100% identical to the sequence of SEQ ID NO: 350, or a reverse complement thereof. In some embodiments, the LDLR-encoding transcript comprises a sequence that is at least 80%, 85%, 90%, 91%, 92%, 93%, 94%, 95%, 96%, 97%, 98%, 99% or 100% identical to the sequence of SEQ ID NO: 351, or a reverse complement thereof. In some embodiments, the LDLR-encoding transcript comprises a sequence that is at least 80%, 85%, 90%, 91%, 92%, 93%, 94%, 95%, 96%, 97%, 98%, 99% or 100% identical to the sequence of SEQ ID NO: 352, or a reverse complement thereof.

[0153] In some embodiments, the antisense oligonucleotide targets 16, 17, 18, 19, 20, 21, 22, 23, 24, 25, 26, 27, 28, 29, 30, 31 or 32 contiguous nucleotides of a sequence that is at least 80%, 85%, 90%, 91%, 92%, 93%, 94%, 95%, 96%, 97%, 98%, 99% or 100% identical to the sequence of any one of SEQ ID NOs: 350, 351, or 352, or a reverse complement thereof. In some embodiments, the antisense oligonucleotide targets 19, 20, 21, 22, 23, 24, 25, 26, 27, 28, 29, 30, 31 or 32 contiguous nucleotides of a sequence that is at least 80%, 85%, 90%, 91%, 92%, 93%, 94%, 95%, 96%, 97%, 98%, 99% or 100% identical to the sequence of SEQ ID NO: 350, or a reverse complement thereof. In some embodiments, the antisense oligonucleotide targets 19, 20, 21, 22, 23, 24, 25, 26, 27, 28, 29, 30, 31 or 32 contiguous nucleotides of a sequence that is at least 80%, 85%, 90%, 91%, 92%, 93%, 94%, 95%, 96%, 97%, 98%, 99% or 100% identical to the sequence of SEQ ID NO: 351, or a reverse complement thereof. In some embodiments, the antisense oligonucleotide targets 19, 20, 21, 22, 23, 24, 25, 26, 27, 28, 29, 30, 31 or 32 contiguous nucleotides of a sequence that is at least 80%, 85%, 90%, 91%, 92%, 93%, 94%, 95%, 96%, 97%, 98%, 99% or 100% identical to the sequence of SEQ ID NO: 352, or a reverse complement thereof.

[0154] In some embodiments, the antisense oligonucleotide targets 16-32 contiguous nucleotides of a sequence that is at least 80%, 85%, 90%, 91%, 92%, 93%, 94%, 95%, 96%, 97%, 98%, 99% or 100% identical to the sequence of any one of SEQ ID NOs: 350, 351, or 352, or a reverse complement thereof. In some embodiments, the antisense oligonucleotide targets 19-32, 19-25, 19-22, or 20-21 contiguous nucleotides of a sequence that is at least 80%, 85%, 90%, 91%, 92%, 93%, 94%, 95%, 96%, 97%, 98%, 99% or 100% identical to the sequence of SEQ ID NO: 350, or a reverse complement thereof. In some embodiments, the antisense oligonucleotide targets 19-32, 19-25, 19-22, or 20-21 contiguous nucleotides of a sequence that is at least 80%, 85%, 90%, 91%, 92%, 93%, 94%, 95%, 96%, 97%, 98%, 99% or 100% identical to the sequence of SEQ ID NO: 351, or a reverse complement thereof. In some embodiments, the antisense oligonucleotide targets 19-32, 19-25, 19-22, or 20-21 contiguous nucleotides of a sequence that is at least 80%, 85%, 90%, 91%, 92%, 93%, 94%, 95%, 96%, 97%, 98%, 99% or 100% identical to the sequence of SEQ ID NO: 352, or a reverse complement thereof.

### C. Non-RNAi Agents

[0155] In some embodiments, the agent that blocks LDL binding to LDLR and/or otherwise inhibit or reduce the interaction between LDL and the receptor and/or for preventing LNP uptake into liver cells or tissue is a small molecule, antibody, or soluble receptor. In some embodiments, the non-RNAi agent targets the LDLR.

### D. Agent Delivery

[0156] In some embodiments, the compositions comprise: a) an agent that blocks LDL binding to an LDL receptor (LDLR) and/or for prevents LNP uptake into liver cells or tissue and b) a delivery molecule that delivers the agent to the liver. In some embodiments, the delivery molecule comprises a lipid nanoparticle (LNP), a lipoplex, an adenovirus vector, or an AAV. In some embodiments, the delivery molecule comprises an AAV, and the AAV is an AAV1, AAV2, AAV3, AAV4, AAVS, AAV6, AAV7, AAV8, AAVrh10, AAVrh74, AAV9, AAV9P, or Myo-AAV. In some embodiments, the delivery molecule comprises a lipoplex. In some embodiments, the delivery molecule comprises an LNP. In some embodiments, the LNP is a liver-tropic LNP. In some embodiments, the LNP comprises LP-01. In some embodiments, the LNP comprise MC3. In some embodiments, the LNP comprises an ionizable lipid. In some embodiments, the LNP comprises a helper lipid (e.g., 1,2-distearoyl-sn-glycero-3-phosphorylcholine (DSPC) or N-(hexadecanoyl)-sphing-4-enine-1-phosphocholine (egg sphingomyelin [ESM])). In some embodiments, the LNP comprises a PEGylated-lipid. In some embodiments, the LNP comprises ionizable lipid/helper lipid/cholesterol/PEG-lipid in molar ratios of 50:10:38.5:1.5, respectively. In some embodiments, the LNP comprises ionizable lipid/helper lipid/cholesterol/PEG-lipid in molar ratios of 20:44.25:34.25:1.5 mol/mol, 30:38.5:30:1.5, 40:33:25.5:1.5, 50:27.25:21.25:1.5 mol/mol, or 55:24.5:19:1.5 mol/mol. In some embodiments, the LNP comprises DSPC. In some embodiments, the LNP comprises cholesterol. In some embodiments, the LNP comprises myristoyl diglyceride. In some embodiments, the LNP comprises PEG-ylated myristoyl diglyceride. In some embodiments, the LNP comprises DMG-PEG2000. In some embodiments, the LNP comprises LP-01 (BP-26809, BroadPharm), DSPC (850365, Avanti Polar Lipids), Cholesterol (C3045, Milipore Sigma), and DMG-PEG2000 (880151, Avanti Polar Lipids). In some embodiments, the LNP comprises about 50% LP-01, about 39% cholesterol, about 9% DSPC, and about 2% DMG-PEG2000. In some embodiments, the LNP comprises PEG-carbamoyl-1,2-dimyristyloxy-propylamine, DLin-DMA, DSPC, and cholesterol at a molar ratio of 2:40:10:4. In some embodiments, the LNP comprises lipidoid 98N12-5(1)4HCl, cholesterol, and mPEG2000-DMG at a molar ratio of 42:48:10. In some embodiments, the LNP comprises DLin-MC3-DMA, cholesterol, and mPEG2000-DMG at a molar ratio of 42:48:10. In some embodiments, the LNP is any of the LNPs described in Xu et al., 2023, ACS Nano, 17, 5, 4942-4957, which is incorporated herein in its entirety.

[0157] In some embodiments, the delivery molecule is conjugated to the agent (e.g., RNAi, ASO, or siRNA), and functions to deliver the agent to the liver. As used herein, “liver targeting moiety” includes but is not limited to, any conjugate that can be applied to any of the agents that block LDL binding to an LDLR (e.g., siRNAs, ASOs or RNAi) and/or for prevent LNP uptake into liver cells or tissue to enhance their delivery and/or uptake by the liver, including any known conjugates. Lipid moieties (e.g., lipid-conjugated siRNAs or ASOs), such as cholesterol-conjugated siRNAs or ASOs, and any other conjugates groups or moieties that are known in the art to effectively target the liver can also be used. In some embodiments, the delivery molecule comprises a lipid. In some embodiments, the compositions comprise lipid-conjugated agents (e.g., siRNAs or ASOs).

[0158] In some embodiments, the delivery molecule comprises at least one galactose or galactose derivative. In some embodiments, the compositions comprise siRNA conjugated to at least one galactose or galactose derivative. Galactose or galactose derivatives can target hepatocytes via their binding to the asialo glycoprotein receptor that is unique to and is highly expressed on the surface of hepatocytes (ASGPr). Binding of galactose moieties to ASGPr facilitates intracellular entry of the cell-specific target of the transferring polymer into the hepatocyte and the delivery polymer to the hepatocyte. Exemplary galactose or galactose derivatives include lactose, galactose, N-acetylgalactosamine (GalNAc), GalNAc-6 (doi: 10.1038/s41467-023-37465-1), galactosamine, N-formylgalactosamine, N-acetylgalactosamine, N-propionylgalactosamine, Nn-butanoylgalactosamine, and N-isobutanoyl-galactosamine (Iobst, S T and Drickamer, K. JBC 1996, 271, 6686). In some embodiments, the delivery molecule comprises N-acetylgalactosamine (GalNAc). In some embodiments, the delivery molecule comprises GalNAc-6. In some embodiments, the compositions comprise GalNAc-conjugated agents (e.g., siRNAs or ASOs).

[0159] As is also known in the art, the agent that blocks LDL binding to an LDLR and/or prevents LNP uptake into liver cells or tissue can be delivered by non-viral tissue-specific delivery vehicles. In some embodiments, the delivery molecule comprises nanoparticles, liposomes, ribonucleoproteins, positively charged peptides, small molecule RNA-conjugates, aptamer-RNA chimeras, and RNA-fusion protein complexes. In some embodiments, the delivery molecule comprises a lipid nanoparticle (LNP).

[0160] A LNP refers to any particle having a diameter of less than 1000 nm, 500 nm, 250 nm, 200 nm, 150 nm, 100 nm, 75 nm, 50 nm, or 25 nm. Alternatively, a nanoparticle can range in size from 1-1000 nm, 1-500 nm, 1-250 nm, 25-200 nm, 25-100 nm, 35-75 nm, or 25-60 nm.

[0161] LNPs can be made from cationic, anionic, or neutral lipids. Neutral lipids, such as the fusogenic phospholipid DOPE or the membrane component cholesterol, can be included in LNPs as ‘helper lipids’ to enhance transfection activity and nanoparticle stability. Limitations of cationic lipids include low efficacy owing to poor stability and rapid clearance, as well as the generation of inflammatory or anti-inflammatory responses. LNPs can also be comprised of hydrophobic lipids, hydrophilic lipids, or both hydrophobic and hydrophilic lipids. Any lipid or combination of lipids that are known in the art can be used to produce an LNP. Examples of lipids used to produce LNPs are: DOTMA, DOSPA, DOTAP, DMRIE, DC-cholesterol, DOTAP-cholesterol, GAP-DMORIE-DPyPE, and GL67A-DOPE-DMPE-polyethylene glycol (PEG). Examples of cationic lipids are: 98N12-5, C12-200, DLin-KC2-DMA (KC2), DLin-MC3-DMA (MC3), XTC, MD1, and 7C1. Examples of neutral lipids are: DPSC, DPPC, POPC, DOPE, and SM. Examples of PEG-modified lipids are: PEG-DMG, PEG-CerC14, and PEG-CerC20. In particular embodiments, the LNP comprises DOSPA (2,3-dioleoyloxy-N-[2(sperminecarboxamido)ethyl]-N,N-dimethyl-1-propaniminium trifluoroacetate) and DOPE (dioleoylphosphatidylethanolamine). The lipids can be combined in any number of molar ratios to produce an LNP. In some embodiments, the LNP comprises a 3:1 mixture of DOSPA and DOPE. In addition, the polynucleotide(s) can be combined with lipid(s) in a wide range of molar ratios to produce an LNP. In some embodiments, the LNP is an “off-the-shelf” LNP, such as Lipofectamine.

### E. Payload

[0162] In some embodiments, the agent that blocks LDL binding to an LDLR and/or prevents LNP uptake into liver cells or tissue and that is delivered by a delivery molecule to the liver further comprises a payload. In some embodiments, the payload comprises a therapeutic agent. In some embodiments, the payload is administered with an LNP, or lipoplex. In some compositions, the payload is encapsulated in a lipid nanoparticle (LNP). In some embodiments, the payload is encapsulated in a lipoplex.

[0163] In some embodiments, administration of any of the agents that block LDL binding to LDLR and/or prevents LNP uptake into liver cells or tissue increases the percentage of payload delivered to a non-liver target. In some embodiments, administration of any of the agents that block LDL binding to LDLR and/or prevents LNP uptake into liver cells or tissue decreases the percentage of payload delivered to the liver. Accordingly, the present invention contemplates administering a single payload or multiple payloads, optionally in one or more LNPs, that have a non-liver target and/or compositions thereof. In particular embodiments, the agents that block LDL binding to the LDLR and/or that prevent LNP uptake into liver cells or tissue are administered separately from the payload (e.g., in separate LNPs).

[0164] In particular embodiments, the payload is associated with an LNP or lipoplex. Lipid nanoparticles (LNPs) and lipoplexes are a known means for delivery of nucleotide and protein cargo, and may be used for delivery of the payloads, guide RNAs, compositions, or pharmaceutical formulations disclosed herein. In some embodiments, the LNPs or lipoplexes deliver nucleic acid, protein, or nucleic acid together with protein.

[0165] In some embodiments, the payload comprises CRISPR-Cas components, any of which are known in the art. In some embodiments, the payload comprises a component of a CRISPR/Cas system or a nucleic acid encoding one or more component of a CRISPR/Cas system, a biologic, or a small molecule, optionally wherein the component of a CRISPR/Cas system comprises a nucleic acid encoding one or more a guide RNAs, one or more scaffolds, and/or one or more endonucleases. In some embodiments, the payload comprises a nucleic acid encoding a Cas9 protein. Such embodiments include for example, a payload comprising a nucleic acid encoding Streptococcus pyogenes (SpCas9), Staphylococcus aureus (SaCas9) and/or Staphylococcus lugdunensis (SluCas9) and further comprising a nucleic acid encoding one or more guide RNAs. In such embodiments, the nucleic acid encoding the Cas9 protein is under the control of a CK8e promoter. In some embodiments, the nucleic acid encoding the guide RNA sequence is under the control of a hU6c promoter. In some embodiments, in addition to guide RNA and Cas9 sequences, the one or more vectors further comprise nucleic acids that do not encode guide RNAs. Nucleic acids that do not encode guide RNA and Cas9 include, but are not limited to, promoters, enhancers, and regulatory sequences. In some embodiments, the payload comprises one or more nucleotide sequence(s) encoding a crRNA, a trRNA, or a crRNA and trRNA.

[0166] In some embodiments, the muscle-cell cell specific promoter is a variant of the CK8 promoter, called CK8e. In some embodiments, the size of the CK8e promoter is 436 bp. In some embodiments, the CK8e promoter comprises a nucleotide sequence that is at least 90%, 91%, 92%, 93%, 94%, 95%, 96%, 97%, 98%, 99% or 100% identical to the sequence of SEQ ID NO: 302:

| | |
|---|---|
| 1 | TGCCCATGTA AGGAGGCAAG GCCTGGGGAC ACCCGAGATG CCTGGTTATA ATTAACCCAG |
| 61 | ACATGTGGCT GCCCCCCCCC CCCCAACACC TGCTGCCTCT AAAAATAACC CTGCATGCCA |
| 121 | TGTTCCCGGC GAAGGGCCAG CTGTCCCCCG CCAGCTAGAC TCAGCACTTA GTTTAGGAAC |
| 181 | CAGTGAGCAA GTCAGCCCTT GGGGCAGCCC ATACAAGGCC ATGGGGCTGG GCAAGCTGCA |
| 241 | CGCCTGGGTC CGGGGTGGGC ACGGTGCCCG GGCAACGAGC TGAAAGCTCA TCTGCTCTCA |
| 361 | GGGGCCCCTC CCTGGGGACA GCCCCTCCTG GCTAGTCACA CCCTGTAGGC TCCTCTATAT |
| 361 | AACCCAGGGG CACAGGGGCT GCCCTCATTC TACCACCACC TCCACAGCAC AGACAGACAC |
| 421 | TCAGGAGCCA GCCAGC |

[0167] In some embodiments, the promoter for expression of any of the nucleic acids disclosed herein is a U6 promoter. In some embodiments, the U6 promoter is a hU6c promoter and comprises a nucleotide sequence that is at least 90%, 91%, 92%, 93%, 94%, 95%, 96%, 97%, 98%, 99% or 100% identical to the sequence of SEQ ID NO: 303:

GAGGGCCTATTTCCCATGATTCCTTCATATTTGCATATACGATACAAGG
CTGTTAGAGAGATAATTGGAATTAATTTGACTGTAAACACAAAGATATT
AGTACAAAATACGTGACGTAGAAAGTAATAATTTCTTGGGTAGTTTGCA
GTTTTAAAATTATGTTTTAAAATGGACTATCATATGCTTACCGTAACTT
GAAAGTATTTCGATTTCTTGGCTTTATATATCTTGTGGAAAGGACGAAA
CACC.

[0168] In some embodiments, the promoter for expression of any of the nucleic acids disclosed herein is a H1 promoter. In some embodiments, the H1 promoter comprises a nucleotide sequence that is at least 90%, 91%, 92%, 93%, 94%, 95%, 96%, 97%, 98%, 99% or 100% identical to the sequence of SEQ ID NO: 304:

| | |
|---|---|
| gctcggcgcg cccatatttg catgtcgcta tgtgttctgg gaaatcacca taaacgtgaa | 60 |
| atgtctttgg atttgggaat cttataagtt ctgtatgaga ccacggta | 108 |

[0169] In some embodiments, the promoter for expression of any of the nucleic acids disclosed herein is a 7SK2 promoter. In some embodiments, the 7SK promoter is a 7SK2 promoter and comprises a nucleotide sequence that is at least 90%, 91%, 92%, 93%, 94%, 95%, 96%, 97%, 98%, 99% or 100% identical to the sequence of SEQ ID NO: 305:

CTGCAGTATTTAGCATGCCCCACCCATCTGCAAGGCATTCTGGATAGTG
TCAAAACAGCCGGAAATCAAGTCCGTTTATCTCAAACTTTAGCATTTTG
GGAATAAATGATATTTGCTATGCTGGTTAAATTAGATTTTAGTTAAATT
TCCTGCTGAAGCTCTAGTACGATAAGCAACTTGACCTAAGTGTAAAGTT
GAGACTTCCTTCAGGTTTATATAGCTTGTGCGCCGCTTGGGTACCTC.

[0170] In some embodiments, the payload comprises one or more guide RNAs. In some embodiments, the guide RNA is chemically modified. A guide RNA comprising one or more modified nucleosides or nucleotides is called a “modified” guide RNA or “chemically modified” guide RNA, to describe the presence of one or more non-naturally and/or naturally occurring components or configurations that are used instead of or in addition to the canonical A, G, C, and U residues. A discussion of modified guide RNAs can be found in WO2022/056000, which is incorporated herein in its entirety. In some embodiments, the guide RNAs are unmodified.

[0171] In some embodiments, the payload comprises multiple nucleic acids encoding more than one guide RNA. In some embodiments, the payload comprises two nucleic acids encoding two guide RNA sequences.

[0172] In some embodiments, the payload comprises a nucleic acid encoding a Cas9 protein (e.g., an SaCas9 protein or SluCas9 protein), a nucleic acid encoding a first guide RNA, and a nucleic acid encoding a second guide RNA. In some embodiments, the payload does not comprise a nucleic acid encoding more than two guide RNAs. In some embodiments, the nucleic acid encoding the first guide RNA is the same as the nucleic acid encoding the second guide RNA. In some embodiments, the nucleic acid encoding the first guide RNA is different from the nucleic acid encoding the second guide RNA. In some embodiments, the payload comprises a single nucleic acid molecule, wherein the single nucleic acid molecule comprises a nucleic acid encoding a Cas9 protein, a nucleic acid encoding a first guide RNA, and a nucleic acid that is the reverse complement to the coding sequence for the second guide RNA. In some embodiments, the payload comprises a single nucleic acid molecule, wherein the single nucleic acid molecule comprises a nucleic acid encoding a Cas9 protein, a nucleic acid that is the reverse complement to the coding sequence for the first guide RNA, and a nucleic acid that is the reverse complement to the coding sequence for the second guide RNA. In some embodiments, the nucleic acid encoding a Cas9 protein (e.g., an SaCas9 or SluCas9 protein) is under the control of the CK8e promoter. In some embodiments, the first guide is under the control of the 7SK2 promoter, and the second guide is under the control of the H1m promoter. In some embodiments, the first guide is under the control of the H1m promoter, and the second guide is under the control of the 7SK2 promoter. In some embodiments, the first guide is under the control of the hU6c promoter, and the second guide is under the control of the H1m promoter. In some embodiments, the first guide is under the control of the H1m promoter, and the second guide is under the control of the hU6c promoter. In some embodiments, the nucleic acid encoding the Cas9 protein is: a) between the nucleic acids encoding the guide RNAs, b) between the nucleic acids that are the reverse complement to the coding sequences for the guide RNAs, c) between the nucleic acid encoding the first guide RNA and the nucleic acid that is the reverse complement to the coding sequence for the second guide RNA, d) between the nucleic acid encoding the second guide RNA and the nucleic acid that is the reverse complement to the coding sequence for the first guide RNA, e) 5′ to the nucleic acids encoding the guide RNAs, f) 5′ to the nucleic acids that are the reverse complements to the coding sequences for the guide RNAs, g) 5′ to a nucleic acid encoding one of the guide RNAs and 5′ to a nucleic acid that is the reverse complement to the coding sequence for the other guide RNA, h) 3′ to the nucleic acids encoding the guide RNAs, i) 3′ to the nucleic acids that are the reverse complements to the coding sequences for the guide RNAs, or j) 3′ to a nucleic acid encoding one of the guide RNAs and 3′ to a nucleic acid that is the reverse complement to the coding sequence for the other guide RNA.

[0173] In some embodiments, the payload comprises a nucleic acid encoding at least a first guide RNA and a second guide RNA. In some embodiments, the nucleic acid comprises a spacer-encoding sequence for the first guide RNA, a scaffold-encoding sequence for the first guide RNA, a spacer-encoding sequence for the second guide RNA, and a scaffold-encoding sequence of the second guide RNA. In some embodiments, the spacer-encoding sequence (e.g., encoding any of the spacer sequences disclosed herein) for the first guide RNA is identical to the spacer-encoding sequence for the second guide RNA. In some embodiments, the spacer-encoding sequence (e.g., encoding any of the spacer sequences disclosed herein) for the first guide RNA is different from the spacer-encoding sequence for the second guide RNA. In some embodiments, the scaffold-encoding sequence for the first guide RNA is identical to the scaffold-encoding sequence for the second guide RNA. In some embodiments, the scaffold-encoding sequence for the first guide RNA is different from the scaffold-encoding sequence for the nucleic acid encoding the second guide RNA.

[0174] In some embodiments, the payload comprises from 5′ to 3′ with respect to the plus strand: the reverse complement of a first sgRNA scaffold sequence, the reverse complement of a nucleic acid encoding a first sgRNA guide sequence, the reverse complement of a promoter for expression of the nucleic acid encoding the first sgRNA, a promoter for expression of a nucleic acid encoding SaCas9 (e.g., CK8e), a nucleic acid encoding SaCas9, a polyadenylation sequence, a promoter for expression of a second sgRNA, a second sgRNA guide sequence, and a second sgRNA scaffold sequence. In some embodiments the promoter for expression of the nucleic acid encoding the first and/or second sgRNA is a hU6c promoter or a 7SK2 promoter. In some embodiments the promoter for expression of the nucleic acid encoding the second sgRNA is a H1m promoter. In some embodiments, the promoter for SaCas9 is the CK8e promoter. In some embodiments, the nucleic acid sequence encoding SaCas9 is fused to a nucleic acid sequence encoding a nuclear localization sequence (NLS). In some embodiments, the nucleic acid sequence encoding SaCas9 is fused to two nucleic acid sequences each encoding a nuclear localization sequence (NLS). In some embodiments, the nucleic acid sequence encoding SaCas9 is fused to three nucleic acid sequences each encoding a nuclear localization sequence (NLS). In some embodiments, the one or more NLSs is an SV40 NLS. In some embodiments, the one or more NLSs is a c-Myc NLS. In some embodiments, the NLS is fused to the SaCas9 with a linker.

[0175] In some embodiments, the payload is directed to a liver and non-liver target. In some embodiments, the non-liver target is the muscle. In such embodiments, the non-liver payload-based gene therapy is used to treat DMD.

[0176] In some embodiments, the Cas protein comprises an amino acid sequence that is at least 80%, 85%, 90%, 91%, 92%, 93%, 94%, 95%, 96%, 97%, 98%, 99% or 100% identical to the sequence of SEQ ID NO: 320 (designated herein as SpCas9):

[sequence omitted]

[0177] In some embodiments, the nucleic acid encoding SaCas9 encodes an SaCas9 comprising an amino acid sequence that is at least 80%, 85%, 90%, 91%, 92%, 93%, 94%, 95%, 96%, 97%, 98%, 99% or 100% identical to the sequence of SEQ ID NO: 306:

KRNYILGLDIGITSVGYGIIDYETRDVIDAGVRLFKEANVENNEGRRSKRGARRLKRRRRHRI
QRVKKLLFDYNLLTDHSELSGINPYEARVKGLSQKLSEEEFSAALLHLAKRRGVHNVNEVEE
DTGNELSTKEQISRNSKALEEKYVAELQLERLKKDGEVRGSINRFKTSDYVKEAKQLLKVQK
AYHQLDQSFIDTYIDLLETRRTYYEGPGEGSPFGWKDIKEWYEMLMGHCTYFPEELRSVKYA
YNADLYNALNDLNNLVITRDENEKLEYYEKFQIIENVFKQKKKPTLKQIAKEILVNEEDIKGY
RVTSTGKPEFTNLKVYHDIKDITARKEIIENAELLDQIAKILTIYQSSEDIQEELTNLNSELTQEE
IEQISNLKGYTGTHNLSLKAINLILDELWHTNDNQIAIFNRLKLVPKKVDLSQQKEIPTTLVDD
FILSPVVKRSFIQSIKVINAIIKKYGLPNDIIIELAREKNSKDAQKMINEMQKRNRQTNERIEEIIR
TTGKENAKYLIEKIKLHDMQEGKCLYSLEAIPLEDLLNNPFNYEVDHIIPRSVSFDNSFNNKVL
VKQEENSKKGNRTPFQYLSSSDSKISYETFKKHILNLAKGKGRISKTKKEYLLEERDINRFSVQ
KDFINRNLVDTRYATRGLMNLLRSYFRVNNLDVKVKSINGGFTSFLRRKWKFKKERNKGYK
HHAEDALIIANADFIFKEWKKLDKAKKVMENQMFEEKQAESMPEIETEQEYKEIFITPHQIKHI
KDFKDYKYSHRVDKKPNRELINDTLYSTRKDDKGNTLIVNNLNGLYDKDNDKLKKLINKSP
EKLLMYHHDPQTYQKLKLIMEQYGDEKNPLYKYYEETGNYLTKYSKKDNGPVIKKIKYYGN
KLNAHLDITDDYPNSRNKVVKLSLKPYRFDVYLDNGVYKFVTVKNLDVIKKENYYEVNSKC
YEEAKKLKKISNQAEFIASFYNNDLIKINGELYRVIGVNNDLLNRIEVNMIDITYREYLENMN
DKRPPRIIKTIASKTQSIKKYSTDILGNLYEVKSKKHPQIIKKG.

[0178] In some embodiments, the SaCas9 comprises an amino acid sequence that is at least 80%, 85%, 90%, 91%, 92%, 93%, 94%, 95%, 96%, 97%, 98%, 99% or 100% identical to the sequence of SEQ ID NO: 307 (designated herein as SaCas9-KKH or SACAS9KKH):

KRNYILGLDIGITSVGYGIIDYETRDVIDAGVRLFKEANVENNEGRRSKRGARRLKRRRRHRI
QRVKKLLFDYNLLTDHSELSGINPYEARVKGLSQKLSEEEFSAALLHLAKRRGVHNVNEVEE
DTGNELSTKEQISRNSKALEEKYVAELQLERLKKDGEVRGSINRFKTSDYVKEAKQLLKVQK
AYHQLDQSFIDTYIDLLETRRTYYEGPGEGSPFGWKDIKEWYEMLMGHCTYFPEELRSVKYA
YNADLYNALNDLNNLVITRDENEKLEYYEKFQIIENVFKQKKKPTLKQIAKEILVNEEDIKGY
RVTSTGKPEFTNLKVYHDIKDITARKEIIENAELLDQIAKILTIYQSSEDIQEELTNLNSELTQEE
IEQISNLKGYTGTHNLSLKAINLILDELWHTNDNQIAIFNRLKLVPKKVDLSQQKEIPTTLVDD
FILSPVVKRSFIQSIKVINAIIKKYGLPNDIIIELAREKNSKDAQKMINEMQKRNRQTNERIEEIIR
TTGKENAKYLIEKIKLHDMQEGKCLYSLEAIPLEDLLNNPFNYEVDHIIPRSVSFDNSFNNKVL
VKQEENSKKGNRTPFQYLSSSDSKISYETFKKHILNLAKGKGRISKTKKEYLLEERDINRFSVQ
KDFINRNLVDTRYATRGLMNLLRSYFRVNNLDVKVKSINGGFTSFLRRKWKFKKERNKGYK
HHAEDALIIANADFIFKEWKKLDKAKKVMENQMFEEKQAESMPEIETEQEYKEIFITPHQIKHI
KDFKDYKYSHRVDKKPNRKLINDTLYSTRKDDKGNTLIVNNLNGLYDKDNDKLKKLINKSP
EKLLMYHHDPQTYQKLKLIMEQYGDEKNPLYKYYEETGNYLTKYSKKDNGPVIKKIKYYGN
KLNAHLDITDDYPNSRNKVVKLSLKPYRFDVYLDNGVYKFVTVKNLDVIKKENYYEVNSKC
YEEAKKLKKISNQAEFIASFYKNDLIKINGELYRVIGVNNDLLNRIEVNMIDITYREYLENMN
DKRPPHIIKTIASKTQSIKKYSTDILGNLYEVKSKKHPQIIKKG.

[0179] In some embodiments, the nucleic acid encoding SluCas9 encodes a SluCas9 comprising an amino acid sequence that is at least 80%, 85%, 90%, 91%, 92%, 93%, 94%, 95%, 96%, 97%, 98%, 99% or 100% identical to the sequence of SEQ ID NO: 308:

NQKFILGLDIGITSVGYGLIDYETKNIIDAGVRLFPEANVENNEGRRSKRGSRRLKRRRIHRLE
RVKKLLEDYNLLDQSQIPQSTNPYAIRVKGLSEALSKDELVIALLHIAKRRGIHKIDVIDSNDD
VGNELSTKEQLNKNSKLLKDKFVCQIQLERMNEGQVRGEKNRFKTADIIKEIIQLLNVQKNFH
QLDENFINKYIELVEMRREYFEGPGKGSPYGWEGDPKAWYETLMGHCTYFPDELRSVKYAY
SADLFNALNDLNNLVIQRDGLSKLEYHEKYHIIENVFKQKKKPTLKQIANEINVNPEDIKGYRI
TKSGKPQFTEFKLYHDLKSVLFDQSILENEDVLDQIAEILTIYQDKDSIKSKLTELDILLNEEDK
ENIAQLTGYTGTHRLSLKCIRLVLEEQWYSSRNQMEIFTHLNIKPKKINLTAANKIPKAMIDEF
ILSPVVKRTFGQAINLINKIIEKYGVPEDIIIELARENNSKDKQKFINEMQKKNENTRKRINEIIG
KYGNQNAKRLVEKIRLHDEQEGKCLYSLESIPLEDLLNNPNHYEVDHIIPRSVSFDNSYHNKV
LVKQSENSKKSNLTPYQYFNSGKSKLSYNQFKQHILNLSKSQDRISKKKKEYLLEERDINKFE
VQKEFINRNLVDTRYATRELTNYLKAYFSANNMNVKVKTINGSFTDYLRKVWKFKKERNH
GYKHHAEDALIIANADFLFKENKKLKAVNSVLEKPEIETKQLDIQVDSEDNYSEMFIIPKQVQ
DIKDFRNFKYSHRVDKKPNRQLINDTLYSTRKKDNSTYIVQTIKDIYAKDNTTLKKQFDKSPE
KFLMYQHDPRTFEKLEVIMKQYANEKNPLAKYHEETGEYLTKYSKKNNGPIVKSLKYIGNK
LGSHLDVTHQFKSSTKKLVKLSIKPYRFDVYLTDKGYKFITISYLDVLKKDNYYYIPEQKYDK
LKLGKAIDKNAKFIASFYKNDLIKLDGEIYKIIGVNSDTRNMIELDLPDIRYKEYCELNNIKGEP
RIKKTIGKKVNSIEKLTTDVLGNVFTNTQYTKPQLLFKRGN.

[0180] In some embodiments, the Cas protein is any of the engineered Cas proteins disclosed in Schmidt et al., 2021, Nature Communications, “Improved CRISPR genome editing using small highly active and specific engineered RNA-guided nucleases.”

[0181] In some embodiments, the Cas9 comprises an amino acid sequence that is at least 80%, 85%, 90%, 91%, 92%, 93%, 94%, 95%, 96%, 97%, 98%, 99% or 100% identical to the sequence of SEQ ID NO: 309 (designated herein as sRGN1):

MNQKFILGLDIGITSVGYGLIDYETKNIIDAGVRLFPEANVENNEGRRSKRGSRRLKRRRIHRL
DRVKHLLAEYDLLDLTNIPKSTNPYQTRVKGLNEKLSKDELVIALLHIAKRRGIHNVDVAAD
KEETASDSLSTKDQINKNAKFLESRYVCELQKERLENEGHVRGVENRFLTKDIVREAKKIIDT
QMQYYPEIDETFKEKYISLVETRREYFEGPGKGSPFGWEGNIKKWFEQMMGHCTYFPEELRS
VKYSYSAELFNALNDLNNLVITRDEDAKLNYGEKFQIIENVFKQKKTPNLKQIAIEIGVHETEI
KGYRVNKSGTPEFTEFKLYHDLKSIVFDKSILENEAILDQIAEILTIYQDEQSIKEELNKLPEILN
EQDKAEIAKLIGYNGTHRLSLKCIHLINEELWQTSRNQMEIFNYLNIKPNKVDLSEQNKIPKD
MVNDFILSPVVKRTFIQSINVINKVIEKYGIPEDIIIELARENNSDDRKKFINNLQKKNEATRKRI
NEIIGQTGNQNAKRIVEKIRLHDQQEGKCLYSLKDIPLEDLLRNPNNYDIDHIIPRSVSFDDSM
HNKVLVRREQNAKKNNQTPYQYLTSGYADIKYSVFKQHVLNLAENKDRMTKKKREYLLEE
RDINKFEVQKEFINRNLVDTRYATRELTNYLKAYFSANNMNVKVKTINGSFTDYLRKVWKF
KKERNHGYKHHAEDALIIANADFLFKENKKLKAVNSVLEKPEIETKQLDIQVDSEDNYSEMFI
IPKQVQDIKDFRNFKYSHRVDKKPNRQLINDTLYSTRKKDNSTYIVQTIKDIYAKDNTTLKKQ
FDKSPEKFLMYQHDPRTFEKLEVIMKQYANEKNPLAKYHEETGEYLTKYSKKNNGPIVKSLK
YIGNKLGSHLDVTHQFKSSTKKLVKLSIKPYRFDVYLTDKGYKFITISYLDVLKKDNYYYIPE
QKYDKLKLGKAIDKNAKFIASFYKNDLIKLDGEIYKIIGVNSDTRNMIELDLPDIRYKEYCELN
NIKGEPRIKKTIGKKVNSIEKLTTDVLGNVFTNTQYTKPQLLFKRGN.

[0182] In some embodiments, the Cas9 comprises an amino acid sequence that is at least 80%, 85%, 90%, 91%, 92%, 93%, 94%, 95%, 96%, 97%, 98%, 99% or 100% identical to the sequence of SEQ ID NO: 310 (designated herein as sRGN2):

MNQKFILGLDIGITSVGYGLIDYETKNIIDAGVRLFPEANVENNEGRRSKRGSRRLKRRRIHRL
ERVKSLLSEYKIISGLAPTNNQPYNIRVKGLTEQLTKDELAVALLHIAKRRGIHKIDVIDSNDD
VGNELSTKEQLNKNSKLLKDKFVCQIQLERMNEGQVRGEKNRFKTADIIKEIIQLLNVQKNFH
QLDENFINKYIELVEMRREYFEGPGQGSPFGWNGDLKKWYEMLMGHCTYFPQELRSVKYA
YSADLFNALNDLNNLIIQRDNSEKLEYHEKYHIIENVFKQKKKPTLKQIAKEIGVNPEDIKGYR
ITKSGTPEFTEFKLYHDLKSVLFDQSILENEDVLDQIAEILTIYQDKDSIKSKLTELDILLNEEDK
ENIAQLTGYNGTHRLSLKCIRLVLEEQWYSSRNQMEIFTHLNIKPKKINLTAANKIPKAMIDEF
ILSPVVKRTFIQSINVINKVIEKYGIPEDIIIELARENNSDDRKKFINNLQKKNEATRKRINEIIGQ
TGNQNAKRIVEKIRLHDQQEGKCLYSLESIALMDLLNNPQNYEVDHIIPRSVAFDNSIHNKVL
VKQIENSKKGNRTPYQYLNSSDAKLSYNQFKQHILNLSKSKDRISKKKKDYLLEERDINKFEV
QKEFINRNLVDTRYATRELTSYLKAYFSANNMDVKVKTINGSFTNHLRKVWRFDKYRNHGY
KHHAEDALIIANADFLFKENKKLKAVNSVLEKPEIETKQLDIQVDSEDNYSEMFIIPKQVQDIK
DFRNFKYSHRVDKKPNRQLINDTLYSTRKKDNSTYIVQTIKDIYAKDNTTLKKQFDKSPEKFL
MYQHDPRTFEKLEVIMKQYANEKNPLAKYHEETGEYLTKYSKKNNGPIVKSLKYIGNKLGS
HLDVTHQFKSSTKKLVKLSIKPYRFDVYLTDKGYKFITISYLDVLKKDNYYYIPEQKYDKLKL
GKAIDKNAKFIASFYKNDLIKLDGEIYKIIGVNSDTRNMIELDLPDIRYKEYCELNNIKGEPRIK
KTIGKKVNSIEKLTTDVLGNVFTNTQYTKPQLLFKRGN.

[0183] In some embodiments, the Cas9 comprises an amino acid sequence that is at least 80%, 85%, 90%, 91%, 92%, 93%, 94%, 95%, 96%, 97%, 98%, 99% or 100% identical to the sequence of SEQ ID NO: 311 (designated herein as sRGN3):

MNQKFILGLDIGITSVGYGLIDYETKNIIDAGVRLFPEANVENNEGRRSKRGSRRLKRRRIHRL
ERVKLLLTEYDLINKEQIPTSNNPYQIRVKGLSEILSKDELAIALLHLAKRRGIHNVDVAADKE
ETASDSLSTKDQINKNAKFLESRYVCELQKERLENEGHVRGVENRFLTKDIVREAKKIIDTQM
QYYPEIDETFKEKYISLVETRREYFEGPGQGSPFGWNGDLKKWYEMLMGHCTYFPQELRSV
KYAYSADLFNALNDLNNLIIQRDNSEKLEYHEKYHIIENVFKQKKKPTLKQIAKEIGVNPEDIK
GYRITKSGTPEFTSFKLFHDLKKVVKDHAILDDIDLLNQIAEILTIYQDKDSIVAELGQLEYLM
SEADKQSISELTGYTGTHSLSLKCMNMIIDELWHSSMNQMEVFTYLNMRPKKYELKGYQRIP
TDMIDDAILSPVVKRTFIQSINVINKVIEKYGIPEDIIIELARENNSDDRKKFINNLQKKNEATRK
RINEIIGQTGNQNAKRIVEKIRLHDQQEGKCLYSLESIPLEDLLNNPNHYEVDHIIPRSVSFDNS
YHNKVLVKQSENSKKSNLTPYQYFNSGKSKLSYNQFKQHILNLSKSQDRISKKKKEYLLEER
DINKFEVQKEFINRNLVDTRYATRELTNYLKAYFSANNMNVKVKTINGSFTDYLRKVWKFK
KERNHGYKHHAEDALIIANADFLFKENKKLKAVNSVLEKPEIETKQLDIQVDSEDNYSEMFII
PKQVQDIKDFRNFKYSHRVDKKPNRQLINDTLYSTRKKDNSTYIVQTIKDIYAKDNTTLKKQF
DKSPEKFLMYQHDPRTFEKLEVIMKQYANEKNPLAKYHEETGEYLTKYSKKNNGPIVKSLK
YIGNKLGSHLDVTHQFKSSTKKLVKLSIKPYRFDVYLTDKGYKFITISYLDVLKKDNYYYIPE
QKYDKLKLGKAIDKNAKFIASFYKNDLIKLDGEIYKIIGVNSDTRNMIELDLPDIRYKEYCELN
NIKGEPRIKKTIGKKVNSIEKLTTDVLGNVFTNTQYTKPQLLFKRGN.

[0184] In some embodiments, the Cas9 comprises an amino acid sequence that is at least 80%, 85%, 90%, 91%, 92%, 93%, 94%, 95%, 96%, 97%, 98%, 99% or 100% identical to the sequence of SEQ ID NO: 312 (designated herein as sRGN3.1):

MNQKFILGLDIGITSVGYGLIDYETKNIIDAGVRLFPEANVENNEGRRSKRGSRRLKRRRIHRL
ERVKLLLTEYDLINKEQIPTSNNPYQIRVKGLSEILSKDELAIALLHLAKRRGIHNVDVAADKE
ETASDSLSTKDQINKNAKFLESRYVCELQKERLENEGHVRGVENRFLTKDIVREAKKIIDTQM
QYYPEIDETFKEKYISLVETRREYFEGPGQGSPFGWNGDLKKWYEMLMGHCTYFPQELRSV
KYAYSADLFNALNDLNNLIIQRDNSEKLEYHEKYHIIENVFKQKKKPTLKQIAKEIGVNPEDIK
GYRITKSGTPEFTSFKLFHDLKKVVKDHAILDDIDLLNQIAEILTIYQDKDSIVAELGQLEYLM
SEADKQSISELTGYTGTHSLSLKCMNMIIDELWHSSMNQMEVFTYLNMRPKKYELKGYQRIP
TDMIDDAILSPVVKRTFIQSINVINKVIEKYGIPEDIIIELARENNSDDRKKFINNLQKKNEATRK
RINEIIGQTGNQNAKRIVEKIRLHDQQEGKCLYSLESIPLEDLLNNPNHYEVDHIIPRSVSFDNS
YHNKVLVKQSENSKKSNLTPYQYFNSGKSKLSYNQFKQHILNLSKSQDRISKKKKEYLLEER
DINKFEVQKEFINRNLVDTRYATRELTNYLKAYFSANNMNVKVKTINGSFTDYLRKVWKFK
KERNHGYKHHAEDALIIANADFLFKENKKLKAVNSVLEKPEIETKQLDIQVDSEDNYSEMFII
PKQVQDIKDFRNFKYSHRVDKKPNRQLINDTLYSTRKKDNSTYIVQTIKDIYAKDNTTLKKQF
DKSPEKFLMYQHDPRTFEKLEVIMKQYANEKNPLAKYHEETGEYLTKYSKKNNGPIVKSLK
YIGNKLGSHLDVTHQFKSSTKKLVKLSIKNYRFDVYLTEKGYKFVTIAYLNVFKKDNYYYIP
KDKYQELKEKKKIKDTDQFIASFYKNDLIKLNGDLYKIIGVNSDDRNIIELDYYDIKYKDYCEI
NNIKGEPRIKKTIGKKTESIEKFTTDVLGNLYLHSTEKAPQLIFKRGL.

[0185] In some embodiments, the Cas9 comprises an amino acid sequence that is at least 80%, 85%, 90%, 91%, 92%, 93%, 94%, 95%, 96%, 97%, 98%, 99% or 100% identical to the sequence of SEQ ID NO: 313 (designated herein as sRGN3.2):

MNQKFILGLDIGITSVGYGLIDYETKNIIDAGVRLFPEANVENNEGRRSKRGSRRLKRRRIHRL
ERVKLLLTEYDLINKEQIPTSNNPYQIRVKGLSEILSKDELAIALLHLAKRRGIHNVDVAADKE
ETASDSLSTKDQINKNAKFLESRYVCELQKERLENEGHVRGVENRFLTKDIVREAKKIIDTQM
QYYPEIDETFKEKYISLVETRREYFEGPGQGSPFGWNGDLKKWYEMLMGHCTYFPQELRSV
KYAYSADLFNALNDLNNLIIQRDNSEKLEYHEKYHIIENVFKQKKKPTLKQIAKEIGVNPEDIK
GYRITKSGTPEFTSFKLFHDLKKVVKDHAILDDIDLLNQIAEILTIYQDKDSIVAELGQLEYLM
SEADKQSISELTGYTGTHSLSLKCMNMIIDELWHSSMNQMEVFTYLNMRPKKYELKGYQRIP
TDMIDDAILSPVVKRTFIQSINVINKVIEKYGIPEDIIIELARENNSDDRKKFINNLQKKNEATRK
RINEIIGQTGNQNAKRIVEKIRLHDQQEGKCLYSLESIPLEDLLNNPNHYEVDHIIPRSVSFDNS
YHNKVLVKQSENSKKSNLTPYQYFNSGKSKLSYNQFKQHILNLSKSQDRISKKKKEYLLEER
DINKFEVQKEFINRNLVDTRYATRELTNYLKAYFSANNMNVKVKTINGSFTDYLRKVWKFK
KERNHGYKHHAEDALIIANADFLFKENKKLKAVNSVLEKPEIETKQLDIQVDSEDNYSEMFII
PKQVQDIKDFRNFKFSHRVDKKPNRQLINDTLYSTRMKDEHDYIVQTITDIYGKDNTNLKKQ
FNKNPEKFLMYQNDPKTFEKLSIIMKQYSDEKNPLAKYYEETGEYLTKYSKKNNGPIVKKIK
LLGNKVGNHLDVTNKYENSTKKLVKLSIKNYRFDVYLTEKGYKFVTIAYLNVFKKDNYYYI
PKDKYQELKEKKKIKDTDQFIASFYKNDLIKLNGDLYKIIGVNSDDRNIIELDYYDIKYKDYC
EINNIKGEPRIKKTIGKKTESIEKFTTDVLGNLYLHSTEKAPQLIFKRGL.

[0186] In some embodiments, the Cas9 comprises an amino acid sequence that is at least 80%, 85%, 90%, 91%, 92%, 93%, 94%, 95%, 96%, 97%, 98%, 99% or 100% identical to the sequence of SEQ ID NO: 314 (designated herein as sRGN3.3):

MNQKFILGLDIGITSVGYGLIDYETKNIIDAGVRLFPEANVENNEGRRSKRGSRRLKRRRIHRL
ERVKLLLTEYDLINKEQIPTSNNPYQIRVKGLSEILSKDELAIALLHLAKRRGIHNVDVAADKE
ETASDSLSTKDQINKNAKFLESRYVCELQKERLENEGHVRGVENRFLTKDIVREAKKIIDTQM
QYYPEIDETFKEKYISLVETRREYFEGPGQGSPFGWNGDLKKWYEMLMGHCTYFPQELRSV
KYAYSADLFNALNDLNNLIIQRDNSEKLEYHEKYHIIENVFKQKKKPTLKQIAKEIGVNPEDIK
GYRITKSGTPEFTSFKLFHDLKKVVKDHAILDDIDLLNQIAEILTIYQDKDSIVAELGQLEYLM
SEADKQSISELTGYTGTHSLSLKCMNMIIDELWHSSMNQMEVFTYLNMRPKKYELKGYQRIP
TDMIDDAILSPVVKRTFIQSINVINKVIEKYGIPEDIIIELARENNSDDRKKFINNLQKKNEATRK
RINEIIGQTGNQNAKRIVEKIRLHDQQEGKCLYSLESIPLEDLLNNPNHYEVDHIIPRSVSFDNS
YHNKVLVKQSENSKKSNLTPYQYFNSGKSKLSYNQFKQHILNLSKSQDRISKKKKEYLLEER
DINKFEVQKEFINRNLVDTRYATRELTSYLKAYFSANNMDVKVKTINGSFTNHLRKVWRFD
KYRNHGYKHHAEDALIIANADFLFKENKKLQNTNKILEKPTIENNTKKVTVEKEEDYNNVFE
TPKLVEDIKQYRDYKFSHRVDKKPNRQLINDTLYSTRMKDEHDYIVQTITDIYGKDNTNLKK
QFNKNPEKFLMYQNDPKTFEKLSIIMKQYSDEKNPLAKYYEETGEYLTKYSKKNNGPIVKKI
KLLGNKVGNHLDVTNKYENSTKKLVKLSIKNYRFDVYLTEKGYKFVTIAYLNVFKKDNYYY
IPKDKYQELKEKKKIKDTDQFIASFYKNDLIKLNGDLYKIIGVNSDDRNIIELDYYDIKYKDYC
EINNIKGEPRIKKTIGKKTESIEKFTTDVLGNLYLHSTEKAPQLIFKRGL.

[0187] In some embodiments, the Cas9 comprises an amino acid sequence that is at least 80%, 85%, 90%, 91%, 92%, 93%, 94%, 95%, 96%, 97%, 98%, 99% or 100% identical to the sequence of SEQ ID NO: 315 (designated herein as sRGN4):

MNQKFILGLDIGITSVGYGLIDYETKNIIDAGVRLFPEANVENNEGRRSKRGSRRLKRRRIHRL
ERVKKLLEDYNLLDQSQIPQSTNPYAIRVKGLSEALSKDELVIALLHIAKRRGIHNINVSSEDE
DASNELSTKEQINRNNKLLKDKYVCEVQLQRLKEGQIRGEKNRFKTTDILKEIDQLLKVQKD
YHNLDIDFINQYKEIVETRREYFEGPGKGSPYGWEGDPKAWYETLMGHCTYFPDELRSVKY
AYSADLFNALNDLNNLVIQRDGLSKLEYHEKYHIIENVFKQKKKPTLKQIANEINVNPEDIKG
YRITKSGKPEFTSFKLFHDLKKVVKDHAILDDIDLLNQIAEILTIYQDKDSIVAELGQLEYLMS
EADKQSISELTGYTGTHSLSLKCMNMIIDELWHSSMNQMEVFTYLNMRPKKYELKGYQRIPT
DMIDDAILSPVVKRTFIQSINVINKVIEKYGIPEDIIIELARENNSDDRKKFINNLQKKNEATRKR
INEIIGQTGNQNAKRIVEKIRLHDQQEGKCLYSLESIPLEDLLNNPNHYEVDHIIPRSVSFDNSY
HNKVLVKQSENSKKSNLTPYQYFNSGKSKLSYNQFKQHILNLSKSQDRISKKKKEYLLEERDI
NKFEVQKEFINRNLVDTRYATRELTNYLKAYFSANNMNVKVKTINGSFTDYLRKVWKFKKE
RNHGYKHHAEDALIIANADFLFKENKKLKAVNSVLEKPEIETKQLDIQVDSEDNYSEMFIIPK
QVQDIKDFRNFKYSHRVDKKPNRQLINDTLYSTRKKDNSTYIVQTIKDIYAKDNTTLKKQFD
KSPEKFLMYQHDPRTFEKLEVIMKQYANEKNPLAKYHEETGEYLTKYSKKNNGPIVKSLKYI
GNKLGSHLDVTHQFKSSTKKLVKLSIKPYRFDVYLTDKGYKFITISYLDVLKKDNYYYIPEQK
YDKLKLGKAIDKNAKFIASFYKNDLIKLDGEIYKIIGVNSDTRNMIELDLPDIRYKEYCELNNI
KGEPRIKKTIGKKVNSIEKLTTDVLGNVFTNTQYTKPQLLFKRGN.

[0188] In some embodiments, the payload comprises a single-molecule guide RNA (sgRNA). An sgRNA can comprise, in the 5′ to 3′ direction, an optional spacer extension sequence, a spacer sequence, a minimum CRISPR repeat sequence, a single-molecule guide linker, a minimum tracrRNA sequence, a 3′ tracrRNA sequence and/or an optional tracrRNA extension sequence. The optional tracrRNA extension can comprise elements that contribute additional functionality (e.g., stability) to the guide RNA. The single-molecule guide linker can link the minimum CRISPR repeat and the minimum tracrRNA sequence to form a hairpin structure. The optional tracrRNA extension can comprise one or more hairpins. In particular embodiments, the disclosure provides for an sgRNA comprising a spacer sequence and a tracrRNA sequence.

[0189] An exemplary scaffold sequence suitable for use with SaCas9 to follow the guide sequence at its 3′ end is: GTTTAAGTACTCTGTGCTGGAAACAGCACAGAATCTACTTAAACAAGGCAAAATGCCGT GTTTATCTCGTCAACTTGTTGGCGAGA (SEQ ID NO: 500) in 5′ to 3′ orientation. In some embodiments, an exemplary scaffold sequence for use with SaCas9 to follow the 3′ end of the guide sequence is a sequence that is at least 80%, 85%, 90%, 91%, 92%, 93%, 94%, 95%, 96%, 97%, 98%, 99% or 100% identical to SEQ ID NO: 500, or a sequence that differs from SEQ ID NO: 500 by no more than 1, 2, 3, 4, 5, 10, 15, 20, or 25 nucleotides.

[0190] In some embodiments, a variant of an SaCas9 scaffold sequence may be used. In some embodiments, the SaCas9 scaffold to follow the guide sequence at its 3′ end is referred to as “SaScaffoldV1” and is: GTTTTAGTACTCTGGAAACAGAATCTACTAAAACAAGGCAAAATGCCGTGTTTATCTCGT CAACTTGTTGGCGAGAT (SEQ ID NO: 501) in 5′ to 3′ orientation. In some embodiments, an exemplary scaffold sequence for use with SaCas9 to follow the 3′ end of the guide sequence is a sequence that is at least 80%, 85%, 90%, 91%, 92%, 93%, 94%, 95%, 96%, 97%, 98%, 99% or 100% identical to SEQ ID NO: 910, or a sequence that differs from SEQ ID NO: 910 by no more than 1, 2, 3, 4, 5, 10, 15, 20, or 25 nucleotides.

[0191] In some embodiments, a variant of an SaCas9 scaffold sequence may be used. In some embodiments, the SaCas9 scaffold to follow the guide sequence at its 3′ end is referred to as “SaScaffoldV2” and is: GTTTAAGTACTCTGTGCTGGAAACAGCACAGAATCTACTTAAACAAGGCAAAATGCCGT GTTTATCTCGTCAACTTGTTGGCGAGAT (SEQ ID NO: 502) in 5′ to 3′ orientation. In some embodiments, an exemplary scaffold sequence for use with SaCas9 to follow the 3′ end of the guide sequence is a sequence that is at least 80%, 85%, 90%, 91%, 92%, 93%, 94%, 95%, 96%, 97%, 98%, 99% or 100% identical to SEQ ID NO: 911, or a sequence that differs from SEQ ID NO: 911 by no more than 1, 2, 3, 4, 5, 10, 15, 20, or 25 nucleotides.

[0192] In some embodiments, a variant of an SaCas9 scaffold sequence may be used. In some embodiments, the SaCas9 scaffold to follow the guide sequence at its 3′ end is referred to as “SaScaffoldV3” and is: GTTTAAGTACTCTGGAAACAGAATCTACTTAAACAAGGCAAAATGCCGTGTTTATCTCGT CAACTTGTTGGCGAGAT (SEQ ID NO: 503) in 5′ to 3′ orientation. In some embodiments, an exemplary scaffold sequence for use with SaCas9 to follow the 3′ end of the guide sequence is a sequence that is at least 80%, 85%, 90%, 91%, 92%, 93%, 94%, 95%, 96%, 97%, 98%, 99% or 100% identical to SEQ ID NO: 912, or a sequence that differs from SEQ ID NO: 912 by no more than 1, 2, 3, 4, 5, 10, 15, 20, or 25 nucleotides.

[0193] In some embodiments, a variant of an SaCas9 scaffold sequence may be used. In some embodiments, the SaCas9 scaffold to follow the guide sequence at its 3′ end is referred to as “SaScaffoldV5” and is: GTTTCAGTACTCTGGAAACAGAATCTACTGAAACAAGGCAAAATGCCGTGTTTATCTCGT CAACTTGTTGGCGAGAT (SEQ ID NO: 932) in 5′ to 3′ orientation. In some embodiments, an exemplary scaffold sequence for use with SaCas9 to follow the 3′ end of the guide sequence is a sequence that is at least 80%, 85%, 90%, 91%, 92%, 93%, 94%, 95%, 96%, 97%, 98%, 99% or 100% identical to SEQ ID NO: 932, or a sequence that differs from SEQ ID NO: 932 by no more than 1, 2, 3, 4, 5, 10, 15, 20, or 25 nucleotides.

[0194] Two exemplary scaffold sequences suitable for use with SluCas9 to follow the guide sequence at its 3′ end is: GTTTTAGTACTCTGGAAACAGAATCTACTGAAACAAGACAATATGTCGTGTTTATCCCAT CAATTTATTGGTGGGAT (SEQ ID NO: 900), and GTTTAAGTACTCTGTGCTGGAAACAGCACAGAATCTACTGAAACAAGACAATATGTCGT GTTTATCCCATCAATTTATTGGTGGGA (SEQ ID NO: 601) in 5′ to 3′ orientation. In some embodiments, an exemplary sequence for use with SluCas9 to follow the 3′ end of the guide sequence is a sequence that is at least 80%, 85%, 90%, 91%, 92%, 93%, 94%, 95%, 96%, 97%, 98%, 99% or 100% identical to SEQ ID NO: 900 or SEQ ID NO: 601, or a sequence that differs from SEQ ID NO: 900 or SEQ ID NO: 601 by no more than 1, 2, 3, 4, 5, 10, 15, 20, or 25 nucleotides.

[0195] Exemplary scaffold sequences suitable for use with SluCas9 to follow the guide sequence at its 3′ end are also shown below in the 5′ to 3′ orientation:

| | | | | Streak of |
|---|---|---|---|---|
| | | | | Homology to |
| Scaffold | SEQ | | Homology | Slu v5 |
| ID | ID NO | Scaffold Sequence (5′ to 3′) | to Slu v5 | (# nucleotides) |
| Wildtype | 900 | GTTTTAGTACTCTGGAAACAGAATCTACTGAA | N/A | N/A |
| | | ACAAGACAATATGTCGTGTTTATCCCATCAAT | | |
| | | TTATTGGTGGGAT | | |
| Slu- | 601 | GTTTAAGTACTCTGTGCTGGAAACAGCACAG | N/A | N/A |
| VCGT- | | AATCTACTGAAACAAGACAATATGTCGTGTTT | | |
| 4.5 | | ATCCCATCAATTTATTGGTGGGA | | |
| Slu_v5 | 901 | GTTTCAGTACTCTGGAAACAGAATCTACTGAA | 100.00% | 77 |
| | | ACAAGACAATATGTCGTGTTTATCCCATCAAT | | |
| | | TTATTGGTGGGAT | | |
| Slu_v5-1 | 902 | GTTTggTaACcTaGGAAACTagATCTTaccAAACA | 87.50% | 47 |
| | | AGACAATATGTCGTGTTTATCCCATCAATTTA | | |
| | | TTGGTGGGAT | | |
| Slu_v5-2 | 903 | GTTTCAGTACTCTGGAAACAGAATCTACTGAA | 96.10% | 37 |
| | | ACAAGgCAAaATGcCGTGTTTATCCCATCAATT | | |
| | | TATTGGTGGGAT | | |
| Slu_v5-3 | 904 | GTTTCAGTACTCTGGAAACAGAATCTACTGAA | 94.81% | 48 |
| | | ACAAGACAATATGTCGcgcccaTCCCATCAATTT | | |
| | | ATTGGTGGGAT | | |
| Slu_v5-4 | 905 | GTTTCAGTACTCTGGAAACAGAATCTACTGAA | 91.55% | 55 |
| | | ACAAGACAATATGTCGTGTTTATgggTTgAATT | | |
| | | TATTcGacccAT | | |
| Slu_v5-5 | 906 | GTTTggTaACcTaGGAAACTagATCTTaccAAACA | 83.75% | 31 |
| | | AGgCAAaATGcCGTGTTTATCCCATCAATTTAT | | |
| | | TGGTGGGAT | | |
| Slu_v5-6 | 907 | GTTTggTaACcTaGGAAACTagATCTTaccAAACA | 82.50% | 23 |
| | | AGACAATATGTCGcgcccaTCCCATCAATTTATT | | |
| | | GGTGGGAT | | |
| Slu_v5-7 | 908 | GTTTggTaACcTaGGAAACTagATCTTaccAAACA | 78.38% | 25 |
| | | AGACAATATGTCGTGTTTATgggTTgAATTTAT | | |
| | | TcGacccAT | | |
| Slu_v5-8 | 909 | GTTTCAGTACTCTGGAAACAGAATCTACTGAA | 90.91% | 37 |
| | | ACAAGgCAAaATGcCGcgcccaTCCCATCAATTTA | | |
| | | TTGGTGGGAT | | |
| Slu_v5-9 | 910 | GTTTCAGTACTCTGGAAACAGAATCTACTGAA | 87.32% | 37 |
| | | ACAAGgCAAaATGcCGTGTTTATgggTTgAATTT | | |
| | | ATTcGacccAT | | |
| Slu_v5- | 911 | GTTTCAGTACTCTGGAAACAGAATCTACTGAA | 82.89% | 48 |
| 10 | | ACAAGACAATATGTCGcgcccaTgggTTgAATTTA | | |
| | | TTcGacccAT | | |
| Slu_v5- | 912 | GTTTggTaACcTaGGAAACTagATCTTaccAAACA | 78.75% | 23 |
| 11 | | AGgCAAaATGcCGcgcccaTCCCATCAATTTATTG | | |
| | | GTGGGAT | | |
| Slu_v5- | 913 | GTTTggTaACcTaGGAAACTagATCTTaccAAACA | 74.32% | 9 |
| 12 | | AGgCAAaATGcCGTGTTTATgggTTgAATTTATTc | | |
| | | GacccAT | | |
| Slu_v5- | 914 | GTTTggTaACcTaGGAAACTagATCTTaccAAACA | 70.89% | 18 |
| 13 | | AGACAATATGTCGcgcccaTgggTTgAATTTATTc | | |
| | | GacccAT | | |
| Slu_v5- | 915 | GTTTCAGTACTCTGGAAACAGAATCTACTGAA | 78.95% | 37 |
| 14 | | ACAAGgCAAaATGcCGcgcccaTgggTTgAATTTAT | | |
| | | TcGacccAT | | |
| Slu_v5- | 916 | GTTTggTaACcTaGGAAACTagATCTTaccAAACA | 67.09% | 8 |
| 15 | | AGgCAAaATGcCGcgcccaTgggTTgAATTTATTcGa | | |
| | | cccAT | | |
| Slu_v4 | 917 | GTTTCAGTACTCTGTGCTGGAAACAGCACAGA | N/A | N/A |
| | | ATCTACTGAAACAAGACAATATGTCGTGTTTA | | |
| | | TCCCATCAATTTATTGGTGGGAT | | |

[0196] In some embodiments, the scaffold sequence suitable for use with SluCas9 to follow the guide sequence at its 3′ end is selected from any one of SEQ ID NOs: 900 or 601, or 901-917 in 5′ to 3 orientation (see below). In some embodiments, an exemplary sequence for use with SluCas9 to follow the 3′ end of the guide sequence is a sequence that is at least 65% o, 70%, 75%, 80%, 85% o, 90%, 91%, 92% o, 93%, 94%, 95%, 96% o, 97%, 98% o, 99% o or 100% o identical to any one off SEQ ID NOs: 900 or 601, or 901-917, or a sequence that differs from any one of SEQ ID NOs: 900 or 601, or 901-917 by no more than 1, 2, 3, 4, 5, 10, 15, 20, or 25 nucleotides.

[0197] In some embodiments, the scaffold sequence suitable for use with SluCas9 to follow the guide sequence at its 3′ end is selected from any one of SEQ ID NOs: 901-917 in 5′ to 3 orientation (see below). In some embodiments, an exemplary sequence for use with SluCas9 to follow the 3′ end of the guide sequence is a sequence that is at least 65%, 70%, 75%, 80%, 85%, 90%, 91%, 92%, 93%, 94%, 95%, 96%, 97%, 98%, 99% or 100% identical to any one off SEQ ID NOs: 901-917, or a sequence that differs from any one of SEQ ID NOs: 901-917 by no more than 1, 2, 3, 4, 5, 10, 15, 20, or 25 nucleotides.

[0198] In some embodiments, the nucleic acid encoding the gRNA or the nucleic acid encoding the pair of gRNAs comprises a sequence comprising SEQ ID NO: 900. In some embodiments, the nucleic acid encoding the gRNA or the nucleic acid encoding the pair of gRNAs comprises a sequence comprising SEQ ID NO: 601. In some embodiments, the nucleic acid encoding the gRNA or the nucleic acid encoding the pair of gRNAs comprises a sequence comprising SEQ ID NO: 900. In some embodiments, the nucleic acid encoding the gRNA or the nucleic acid encoding the pair of gRNAs comprises a sequence comprising SEQ ID NO: 901. In some embodiments, the nucleic acid encoding the gRNA or the nucleic acid encoding the pair of gRNAs comprises a sequence comprising SEQ ID NO: 902. In some embodiments, the nucleic acid encoding the gRNA or the nucleic acid encoding the pair of gRNAs comprises a sequence comprising SEQ ID NO: 903. In some embodiments, the nucleic acid encoding the gRNA or the nucleic acid encoding the pair of gRNAs comprises a sequence comprising SEQ ID NO: 904. In some embodiments, the nucleic acid encoding the gRNA or the nucleic acid encoding the pair of gRNAs comprises a sequence comprising SEQ ID NO: 905. In some embodiments, the nucleic acid encoding the gRNA or the nucleic acid encoding the pair of gRNAs comprises a sequence comprising SEQ ID NO: 906. In some embodiments, the nucleic acid encoding the gRNA or the nucleic acid encoding the pair of gRNAs comprises a sequence comprising SEQ ID NO: 907. In some embodiments, the nucleic acid encoding the gRNA or the nucleic acid encoding the pair of gRNAs comprises a sequence comprising SEQ ID NO: 908. In some embodiments, the nucleic acid encoding the gRNA or the nucleic acid encoding the pair of gRNAs comprises a sequence comprising SEQ ID NO: 909. In some embodiments, the nucleic acid encoding the gRNA or the nucleic acid encoding the pair of gRNAs comprises a sequence comprising SEQ ID NO: 910. In some embodiments, the nucleic acid encoding the gRNA or the nucleic acid encoding the pair of gRNAs comprises a sequence comprising SEQ ID NO: 911. In some embodiments, the nucleic acid encoding the gRNA or the nucleic acid encoding the pair of gRNAs comprises a sequence comprising SEQ ID NO: 912. In some embodiments, the nucleic acid encoding the gRNA or the nucleic acid encoding the pair of gRNAs comprises a sequence comprising SEQ ID NO: 913. In some embodiments, the nucleic acid encoding the gRNA or the nucleic acid encoding the pair of gRNAs comprises a sequence comprising SEQ ID NO: 914. In some embodiments, the nucleic acid encoding the gRNA or the nucleic acid encoding the pair of gRNAs comprises a sequence comprising SEQ ID NO: 915. In some embodiments, the nucleic acid encoding the gRNA or the nucleic acid encoding the pair of gRNAs comprises a sequence comprising SEQ ID NO: 916. In some embodiments, the nucleic acid encoding the gRNA or the nucleic acid encoding the pair of gRNAs comprises a sequence comprising SEQ ID NO: 917. In some embodiments, comprising a pair of gRNAs, one of the gRNAs comprises a sequence selected from any one of SEQ ID NOs: 900 or 601, or 901-917. In some embodiments, comprising a pair of gRNAs, both of the gRNAs comprise a sequence selected from any one of SEQ ID NOs: 900 or 601, or 901-917. In some embodiments, comprising a pair of gRNAs, the nucleotides 3′ of the guide sequence of the gRNAs are the same sequence. In some embodiments, comprising a pair of gRNAs, the nucleotides 3′ of the guide sequence of the gRNAs are different sequences.

[0199] In some embodiments, the scaffold sequence comprises one or more alterations in the stem loop 1 as compared to the stem loop 1 of a wildtype SluCas9 scaffold sequence (e.g., a scaffold comprising the sequence of SEQ ID NO: 900) or a reference SluCas9 scaffold sequence (e.g., a scaffold comprising the sequence of SEQ ID NO: 901). In some embodiments, the scaffold sequence comprises one or more alterations in the stem loop 2 as compared to the stem loop 2 of a wildtype SluCas9 scaffold sequence (e.g., a scaffold comprising the sequence of SEQ ID NO: 900) or a reference SluCas9 scaffold sequence (e.g., a scaffold comprising the sequence of SEQ ID NO: 901). In some embodiments, the scaffold sequence comprises one or more alterations in the tetraloop as compared to the tetraloop of a wildtype SluCas9 scaffold sequence (e.g., a scaffold comprising the sequence of SEQ ID NO: 900) or a reference SluCas9 scaffold sequence (e.g., a scaffold comprising the sequence of SEQ ID NO: 901). In some embodiments, the scaffold sequence comprises one or more alterations in the repeat region as compared to the repeat region of a wildtype SluCas9 scaffold sequence (e.g., a scaffold comprising the sequence of SEQ ID NO: 900) or a reference SluCas9 scaffold sequence (e.g., a scaffold comprising the sequence of SEQ ID NO: 901). In some embodiments, the scaffold sequence comprises one or more alterations in the anti-repeat region as compared to the anti-repeat region of a wildtype SluCas9 scaffold sequence (e.g., a scaffold comprising the sequence of SEQ ID NO: 900) or a reference SluCas9 scaffold sequence (e.g., a scaffold comprising the sequence of SEQ ID NO: 901). In some embodiments, the scaffold sequence comprises one or more alterations in the linker region as compared to the linker region of a wildtype SluCas9 scaffold sequence (e.g., a scaffold comprising the sequence of SEQ ID NO: 900) or a reference SluCas9 scaffold sequence (e.g., a scaffold comprising the sequence of SEQ ID NO: 901). See, e.g., Nishimasu et al., 2015, Cell, 162:1113-1126 for description of regions of a scaffold.

[0200] Where a tracrRNA is used, in some embodiments, it comprises (5′ to 3′) a second complementary domain and a proximal domain. In the case of a sgRNA, guide sequences together with additional nucleotides (e.g., SEQ ID Nos: 500, or 910-912 (for SaCas9), and 900 or 601, or 901-917 (for SluCas9)) form or encode a sgRNA. In some embodiments, an sgRNA comprises (5′ to 3′) at least a spacer sequence, a first complementary domain, a linking domain, a second complementary domain, and a proximal domain. A sgRNA or tracrRNA may further comprise a tail domain. The linking domain may be hairpin-forming. See, e.g., US 2017/0007679 for detailed discussion and examples of crRNA and gRNA domains, including second complementarity domains, linking domains, proximal domains, and tail domains.

[0201] In some embodiments, the payload comprises a nucleic acid molecule comprising at least two guide RNAs, wherein once expressed in vivo or in vivo, the guide RNAs excise a portion of the exon, wherein the size of excised portion of the exon is between 8 and 167 nucleotides.

[0202] In some embodiments, the guide RNAs comprise as non-limiting examples the guide sequences disclosed in Tables 1A, 1B, and Table 2 below. For example, when the payload comprises SaCas9, one or more guide sequences is selected from any one of SEQ ID NOs: 1-35, 1000-1078, and 3000-3069; or when the payload comprises SluCas9, one or more guide sequences selected from any one of SEQ ID NOs: 100-225, 2000-2116, and 4000-4251 from the tables below. Additional exemplary payload compositions, including varieties of RNP complexes (comprising one or more guide RNAs comprising and saCas9 or sluCas9, or a mutant Cas9 protein), are disclosed elsewhere in WO2022/056000, which is incorporated herein in its entirety.

[0203] In some embodiments, the payload comprises a nucleic acid molecule encoding one or more guide RNAs and a Cas9, wherein the nucleic acid molecule comprises a first nucleic acid encoding one or more guide RNAs selected from any one of SEQ ID NOs: 1-35, 1000-1078, or 3000-3069 and a second nucleic acid encoding a Staphylococcus aureus Cas9 (SaCas9).

[0204] In some embodiments, the payload comprises a nucleic acid molecule encoding one or more guide RNAs and a Cas9, wherein the nucleic acid molecule comprises a first nucleic acid encoding one or more guide RNAs selected from any one of SEQ ID NOs: 100-225, 2000-2116, or 4000-4251 and a second nucleic acid encoding a Staphylococcus lugdunensis (SluCas9).

[0205] In some embodiments, the payload comprises a nucleic acid molecule encoding one or more guide RNAs and a Cas9, wherein the nucleic acid molecule comprises a first nucleic acid encoding one or more guide RNAs comprising at least 20 contiguous nucleotides of a guide RNA selected from any one of SEQ ID NOs: 1-35, 1000-1078, or 3000-3069 and a second nucleic acid encoding a Staphylococcus aureus Cas9 (SaCas9).

[0206] In some embodiments, the payload comprises a nucleic acid molecule encoding one or more guide RNAs and a Cas9, wherein the nucleic acid molecule comprises a first nucleic acid encoding one or more guide RNAs comprising at least 20 contiguous nucleotides of a guide RNA selected from any one of SEQ ID NOs: 100-225, 2000-2116, or 4000-4251 and a second nucleic acid encoding a Staphylococcus lugdunensis (SluCas9).

[0207] In some embodiments, the payload comprises a nucleic acid molecule encoding one or more guide RNAs and a Cas9, wherein the nucleic acid molecule comprises a first nucleic acid encoding one or more guide RNAs that is at least 90% identical to any one of SEQ ID NOs: 1-35, 1000-1078, or 3000-3069 and a second nucleic acid encoding a Staphylococcus aureus Cas9 (SaCas9).

[0208] In some embodiments, the payload comprises a nucleic acid molecule encoding one or more guide RNAs and a Cas9, wherein the nucleic acid molecule comprises a first nucleic acid encoding one or more guide RNAs that is at least 90% identical to any one of SEQ ID NOs: 100-225, 2000-2116, or 4000-4251 and a second nucleic acid encoding a Staphylococcus lugdunensis (SluCas9).

[0209] In some embodiments, the payload comprises a nucleic acid molecule encoding one or more guide RNAs and a Cas9, wherein the nucleic acid molecule comprises a first nucleic acid encoding a pair of guide RNAs comprising a first and second guide RNA selected from any one of the following pairs of guide RNAs: SEQ ID NOs: 1020 and 23; 1023 and 23; 1023 and 1037; 1024 and 1055; 1025 and 23; 1025 and 1055; 1026 and 23; 1028 and 1055; 1029 and 1055; 1029 and 1037; 1031 and 1037; 1032 and 1037; 101029 and 1027; 1037 and 1048; 1037 and 1051; 1037 and 1053; 20 and 23; 1038 and 23; 21 and 23; 1040 and 23; 1042 and 1037; 1043 and 1037; 1044 and 1037; 1045 and 1037; 1046 and 1037; 24 and 1037; 1047 and 1055; or 1055 and 1022; and a second nucleic acid encoding a Staphylococcus aureus Cas9 (SaCas9).

[0210] In some embodiments, the payload comprises a nucleic acid molecule encoding one or more guide RNAs and a Cas9, wherein the nucleic acid molecule comprises a first nucleic acid encoding a pair of guide RNAs comprising a first and second guide RNA selected from any one of the following pairs of guide RNAs: SEQ ID NOs: 170 and 179; 172 and 179; 179 and 183; 179 and 185; 179 and 187; 179 and 188; 179 and 189; 179 and 193; 179 and 195; 179 and 196; 179 and 197; 200 and 174; or 200 and 176; and a second nucleic acid encoding a Staphylococcus lugdunensis (SluCas9).

[0211] In some embodiments, the payload comprises a nucleic acid molecule encoding one or more guide RNAs and a Cas9, wherein the nucleic acid molecule comprises a first nucleic acid encoding a pair of guide RNAs comprising a first and second guide RNA selected from any one of the following pairs of guide RNAs: SEQ ID NOs: 117 and 121; 117 and 122; 120 and 121; 120 and 123; 120 and 124; 120 and 125; 122 and 126; 122 and 123; 122 and 124; 122 and 125; or 122 and 126; and a second nucleic acid encoding a Staphylococcus lugdunensis (SluCas9); for targeting exon 44.

[0212] In some embodiments, the payload comprises a nucleic acid molecule encoding one or more guide RNAs and a Cas9, wherein the nucleic acid molecule comprises a first nucleic acid encoding a pair of guide RNAs comprising a first and second guide RNA selected from any one of the following pairs of guide RNAs: 155 and 156; 155 and 158; 155 and 162; 155 and 163; 162 and 157; 162 and 159; 162 and 164; 162 and 166; or 162 and 167; and a second nucleic acid encoding a Staphylococcus lugdunensis (SluCas9); for targeting exon 50.

[0213] In some embodiments, the payload comprises a nucleic acid molecule encoding one or more guide RNAs and a Cas9, wherein the nucleic acid molecule comprises a first nucleic acid encoding a pair of guide RNAs comprising a first and second guide RNA selected from any one of the following pairs of guide RNAs: SEQ ID NOs: 211 and 223; 211 and 225; 214 and 224; 216 and 223; 216 and 225; 220 and 224; 204 and 223; 223 and 224; or 204 and 225; and a second nucleic acid encoding a Staphylococcus lugdunensis (SluCas9); for targeting exon 53.

[0214] In some embodiments, the payload comprises a nucleic acid molecule encoding one or more guide RNAs and a Cas9, wherein the nucleic acid molecule comprises a first nucleic acid encoding a pair of guide RNAs comprising a first and second guide RNA selected from any one of the following pairs of guide RNAs: SEQ ID NOs: 1068 and 32; 1069 and 32; 1070 and 1075; 1071 and 32; 29 and 1075; 1072 and 27; 1072 and 28; 1072 and 32; 1072 and 33; 1073 and 1076; 1073 and 35; 221 and 1077; 1074 and 27; 1074 and 28; 1074 and 33; 32 and 1077; 1075 and 1076; 1075 and 35; 1076 and 26; or 35 and 26; and a second nucleic acid encoding a Staphylococcus aureus Cas9 (SaCas9); for targeting exon 53.

[0215] In some embodiments, the payload comprises a nucleic acid molecule encoding one or more guide RNAs and a Cas9, wherein the nucleic acid molecule comprises a first nucleic acid encoding a pair of guide RNAs comprising a first and second guide RNA selected from any one of the following pairs of guide RNAs: SEQ ID NOs: 148 and 134; 149 and 135; 150 and 135; 131 and 136; 151 and 136; 139 and 131; 139 and 151; 140 and 131; 140 and 151; 141 and 148; 144 and 149; 144 and 150; 145 and 131; 145 and 151; 146 and 148; 134 and 148; 135 and 149; 135 and 150; 136 and 131; 136 and 151; 131 and 139; 151 and 139; 131 and 140; 151 and 140; 148 and 141; 149 and 144; 150 and 144; 131 and 145; 151 and 145; and 148 and 146; and a second nucleic acid encoding a Staphylococcus lugdunensis (SluCas9).

[0216] In some embodiments, the payload comprises a nucleic acid molecule encoding one or more guide RNAs and a Cas9, wherein the nucleic acid molecule comprises a first nucleic acid encoding a pair of guide RNAs comprising a first and second guide RNA selected from any one of the following pairs of guide RNAs: SEQ ID NOs: 10 and 15; 10 and 16; 12 and 16; 1001 and 1005; 1001 and 15; 1001 and 16; 1003 and 1005; 16 and 1003; 12 and 1010; 12 and 1012; 12 and 1013; 10 and 1016; 1017 and 1005; 1017 and 16; 1018 and 16; 15 and 10; 16 and 10; 16 and 12; 1005 and 1001; 15 and 1001; 16 and 1001; 1005 and 1003; 1003 and 16; 1010 and 12; 1012 and 12; 1013 and 12; 1016 and 10; 1005 and 1017; 16 and 1017; and 16 and 1018; and a second nucleic acid encoding a Staphylococcus aureus Cas9 (SaCas9).

[0217] In general, in the case of a DNA nucleic acid construct encoding a guide RNA, the U residues in any of the RNA sequences described herein may be replaced with T residues, and in the case of a guide RNA construct encoded by a DNA, the T residues may be replaced with U residues.

TABLE 1A
Exemplary DMD guide sequences (human-hg38.p12)

| Sequence | | | | | |
|---|---|---|---|---|---|
| ID No. | | | | | |
| of Guide | | | | | |
| Sequence | EXON | CAS9 | strand | Guide sequence | pam |
| 1 | EXON43 | SACAS9 | + | GCAATGCTGCTGTCTTCTTGCT | ATGAAT |
| 2 | EXON43 | SACAS9 | − | AACAAAATGTACAAGGACCGAC | AAGGGT |
| 3 | EXON43 | SACAS9 | − | TGCAAAGTGCAACGCCTGTGGA | AAGGGT |
| 4 | EXON43 | SACAS9 | − | ATAGTCTACAACAAAGCTCAGG | TCGGAT |
| 5 | EXON43 | SACAS9 | − | CTGTTTTAAAATTTTTATATTA | CAGAAT |
| 6 | EXON44 | SACAS9 | + | ATTTAGCATGTTCCCAATTCTC | AGGAAT |
| 7 | EXON44 | SACAS9 | + | AATCGCCTGCAGGTAAAAGCAT | ATGGAT |
| 8 | EXON44 | SACAS9 | − | TCTCAGAAAGACACAAATTCCT | GAGAAT |
| 9 | EXON45 | SACAS9 | + | TCAGGCTTCCCAATTTTTCCTG | TAGAAT |
| 10 | EXON45 | SACAS9 | + | TAGAATACTGGCATCTGTTTTT | GAGGAT |
| 11 | EXON45 | SACAS9 | + | TGGCATCTGTTTTTGAGGATTG | CTGAAT |
| 12 | EXON45 | SACAS9 | + | TTGCCGCTGCCCAATGCCATCC | TGGAGT |
| 13 | EXON45 | SACAS9 | − | GAGGTAGGGCGACAGATCTAAT | AGGAAT |
| 14 | EXON45 | SACAS9 | − | TCTACAGGAAAAATTGGGAAGC | CTGAAT |
| 15 | EXON45 | SACAS9 | − | GCGGCAAACTGTTGTCAGAACA | TTGAAT |
| 16 | EXON45 | SACAS9 | − | TTTTGGTATCTTACAGGAACTC | CAGGAT |
| 17 | EXON50 | SACAS9 | − | ACTATTGGAGCCTGTAAGTATA | CTGGAT |
| 18 | EXON50 | SACAS9 | − | AGGAAGTTAGAAGATCTGAGCT | CTGAGT |
| 19 | EXON51 | SACAS9 | + | TAGTAACCACAGGTTGTGTCAC | CAGAGT |
| 20 | EXON51 | SACAS9 | + | GTTGTGTCACCAGAGTAACAGT | CTGAGT |
| 21 | EXON51 | SACAS9 | + | TCTGAGTAGGAGCTAAAATATT | TTGGGT |
| 22 | EXON51 | SACAS9 | − | GAGGGTGATGGTGGGTGACCTT | GAGGAT |
| 23 | EXON51 | SACAS9 | − | TATAAAATCACAGAGGGTGATG | GTGGGT |
| 24 | EXON51 | SACAS9 | − | TTGATCAAGTTATAAAATCACA | GAGGGT |
| 25 | EXON53 | SACAS9 | + | CCTTGGTTTCTGTGATTTTCTT | TTGGAT |
| 26 | EXON53 | SACAS9 | + | TCCTTAGCTTCCAGCCATTGTG | TTGAAT |
| 27 | EXON53 | SACAS9 | + | CTTGTACTTCATCCCACTGATT | CTGAAT |
| 28 | EXON53 | SACAS9 | + | ACTGATTCTGAATTCTTTCAAC | TAGAAT |
| 29 | EXON53 | SACAS9 | − | AGCCAAGCTTGAGTCATGGAAG | GAGGGT |
| 30 | EXON53 | SACAS9 | − | TTAGGACAGGCCAGAGCCAAGC | TTGAGT |
| 31 | EXON53 | SACAS9 | − | GCAACAGTTGAATGAAATGTTA | AAGGAT |
| 32 | EXON53 | SACAS9 | − | CCTTCAGAACCGGAGGCAACAG | TTGAAT |
| 33 | EXON53 | SACAS9 | − | AGTTGAAAGAATTCAGAATCAG | TGGGAT |
| 34 | EXON53 | SACAS9 | − | TTTTATTCTAGTTGAAAGAATT | CAGAAT |
| 35 | EXON53 | SACAS9 | − | TTTTTCCTTTTATTCTAGTTGA | AAGAAT |
| 100 | EXON43 | SLUCAS9 | + | ATATATGTGTTACCTACCCTTG | TCGG |
| 101 | EXON43 | SLUCAS9 | + | ACATTTTGTTAACTTTTTCCCA | TTGG |
| 102 | EXON43 | SLUCAS9 | + | CTTTTTCCCATTGGAAATCAAG | CTGG |
| 103 | EXON43 | SLUCAS9 | + | TTTTTCCCATTGGAAATCAAGC | TGGG |
| 104 | EXON43 | SLUCAS9 | + | TCCTGTAGCTTCACCCTTTCCA | CAGG |
| 105 | EXON43 | SLUCAS9 | − | AATGTACAAGGACCGACAAGGG | TAGG |
| 106 | EXON43 | SLUCAS9 | − | ACAAAATGTACAAGGACCGACA | AGGG |
| 107 | EXON43 | SLUCAS9 | − | AACAAAATGTACAAGGACCGAC | AAGG |
| 108 | EXON43 | SLUCAS9 | − | GGAAAAAGTTAACAAAATGTAC | AAGG |
| 109 | EXON43 | SLUCAS9 | − | TCTCTCCCAGCTTGATTTCCAA | TGGG |
| 110 | EXON43 | SLUCAS9 | − | CTCTCTCCCAGCTTGATTTCCA | ATGG |
| 111 | EXON43 | SLUCAS9 | − | GCCTGTGGAAAGGGTGAAGCTA | CAGG |
| 112 | EXON43 | SLUCAS9 | − | GCAAAGTGCAACGCCTGTGGAA | AGGG |
| 113 | EXON43 | SLUCAS9 | − | TGCAAAGTGCAACGCCTGTGGA | AAGG |
| 114 | EXON43 | SLUCAS9 | − | AGCATTGCAAAGTGCAACGCCT | GTGG |
| 115 | EXON43 | SLUCAS9 | − | ATAGTCTACAACAAAGCTCAGG | TCGG |
| 116 | EXON43 | SLUCAS9 | − | AAAGATAGTCTACAACAAAGCT | CAGG |
| 117 | EXON44 | SLUCAS9 | + | TATTTAGCATGTTCCCAATTCT | CAGG |
| 118 | EXON44 | SLUCAS9 | + | AACAGATCTGTCAAATCGCCTG | CAGG |
| 119 | EXON44 | SLUCAS9 | + | AATCGCCTGCAGGTAAAAGCAT | ATGG |
| 120 | EXON44 | SLUCAS9 | − | TGCTAAATACAAATGGTATCTT | AAGG |
| 121 | EXON44 | SLUCAS9 | − | ATTGGGAACATGCTAAATACAA | ATGG |
| 122 | EXON44 | SLUCAS9 | − | AAAGACACAAATTCCTGAGAAT | TGGG |
| 123 | EXON44 | SLUCAS9 | − | GAAAGACACAAATTCCTGAGAA | TTGG |
| 124 | EXON44 | SLUCAS9 | − | ATGATATAAAGATATTTAATCA | GTGG |
| 125 | EXON44 | SLUCAS9 | − | TTGACAGATCTGTTGAGAAATG | GCGG |
| 126 | EXON44 | SLUCAS9 | − | GATTTGACAGATCTGTTGAGAA | ATGG |
| 127 | EXON44 | SLUCAS9 | − | TTGATCCATATGCTTTTACCTG | CAGG |
| 128 | EXON45 | SLUCAS9 | + | AGACCTCCTGCCACCGCAGATT | CAGG |
| 129 | EXON45 | SLUCAS9 | + | TCCCAATTTTTCCTGTAGAATA | CTGG |
| 130 | EXON45 | SLUCAS9 | + | TAGAATACTGGCATCTGTTTTT | GAGG |
| 131 | EXON45 | SLUCAS9 | + | TTTGCCGCTGCCCAATGCCATC | CTGG |
| 132 | EXON45 | SLUCAS9 | + | GGAGTTCCTGTAAGATACCAAA | AAGG |
| 133 | EXON45 | SLUCAS9 | − | AGAGGTAGGGCGACAGATCTAA | TAGG |
| 134 | EXON45 | SLUCAS9 | − | CTGTCAGACAGAAAAAAGAGGT | AGGG |
| 135 | EXON45 | SLUCAS9 | − | GCTGTCAGACAGAAAAAAGAGG | TAGG |
| 136 | EXON45 | SLUCAS9 | − | AACAGCTGTCAGACAGAAAAAA | GAGG |
| 137 | EXON45 | SLUCAS9 | − | AAGCCTGAATCTGCGGTGGCAG | GAGG |
| 138 | EXON45 | SLUCAS9 | − | GGGAAGCCTGAATCTGCGGTGG | CAGG |
| 139 | EXON45 | SLUCAS9 | − | AATTGGGAAGCCTGAATCTGCG | GTGG |
| 140 | EXON45 | SLUCAS9 | − | AAAAATTGGGAAGCCTGAATCT | GCGG |
| 141 | EXON45 | SLUCAS9 | − | GCCAGTATTCTACAGGAAAAAT | TGGG |
| 142 | EXON45 | SLUCAS9 | − | TGCCAGTATTCTACAGGAAAAA | TTGG |
| 143 | EXON45 | SLUCAS9 | − | AAAAACAGATGCCAGTATTCTA | CAGG |
| 144 | EXON45 | SLUCAS9 | − | TGTCAGAACATTGAATGCAACT | GGGG |
| 145 | EXON45 | SLUCAS9 | − | TTGTCAGAACATTGAATGCAAC | TGGG |
| 146 | EXON45 | SLUCAS9 | − | GTTGTCAGAACATTGAATGCAA | CTGG |
| 147 | EXON45 | SLUCAS9 | − | AACTCCAGGATGGCATTGGGCA | GCGG |
| 148 | EXON45 | SLUCAS9 | − | TACAGGAACTCCAGGATGGCAT | TGGG |
| 149 | EXON45 | SLUCAS9 | − | TTACAGGAACTCCAGGATGGCA | TTGG |
| 150 | EXON45 | SLUCAS9 | − | GGTATCTTACAGGAACTCCAGG | ATGG |
| 151 | EXON45 | SLUCAS9 | − | TTTTGGTATCTTACAGGAACTC | CAGG |
| 152 | EXON45 | SLUCAS9 | − | GTTTTGCCTTTTTGGTATCTTA | CAGG |
| 153 | EXON45 | SLUCAS9 | − | TCTTTTCTCAAATAAAAAGACA | TGGG |
| 154 | EXON50 | SLUCAS9 | + | AGAATGGGATCCAGTATACTTA | CAGG |
| 155 | EXON50 | SLUCAS9 | + | AGTATACTTACAGGCTCCAATA | GTGG |
| 156 | EXON50 | SLUCAS9 | + | CAGGCTCCAATAGTGGTCAGTC | CAGG |
| 157 | EXON50 | SLUCAS9 | + | CAATAGTGGTCAGTCCAGGAGC | TAGG |
| 158 | EXON50 | SLUCAS9 | + | GTGGTCAGTCCAGGAGCTAGGT | CAGG |
| 159 | EXON50 | SLUCAS9 | + | TTGCCCTCAGCTCTTGAAGTAA | ACGG |
| 160 | EXON50 | SLUCAS9 | − | AGTATACTGGATCCCATTCTCT | TTGG |
| 161 | EXON50 | SLUCAS9 | − | ACTATTGGAGCCTGTAAGTATA | CTGG |
| 162 | EXON50 | SLUCAS9 | − | CTAGCTCCTGGACTGACCACTA | TTGG |
| 163 | EXON50 | SLUCAS9 | − | GCAAAGCAGCCTGACCTAGCTC | CTGG |
| 164 | EXON50 | SLUCAS9 | − | AAACCGTTTACTTCAAGAGCTG | AGGG |
| 165 | EXON50 | SLUCAS9 | − | TAAACCGTTTACTTCAAGAGCT | GAGG |
| 166 | EXON50 | SLUCAS9 | − | AGATCTGAGCTCTGAGTGGAAG | GCGG |
| 167 | EXON50 | SLUCAS9 | − | AGAAGATCTGAGCTCTGAGTGG | AAGG |
| 168 | EXON50 | SLUCAS9 | − | AGTTAGAAGATCTGAGCTCTGA | GTGG |
| 169 | EXON50 | SLUCAS9 | − | ATGTGTATGCTTTTCTGTTAAA | GAGG |
| 170 | EXON51 | SLUCAS9 | + | TGATCATCTCGTTGATATCCTC | AAGG |
| 171 | EXON51 | SLUCAS9 | + | TTGATCAAGCAGAGAAAGCCAG | TCGG |
| 172 | EXON51 | SLUCAS9 | + | AGTCGGTAAGTTCTGTCCAAGC | CCGG |
| 173 | EXON51 | SLUCAS9 | + | GCCCGGTTGAAATCTGCCAGAG | CAGG |
| 174 | EXON51 | SLUCAS9 | + | CAGAGCAGGTACCTCCAACATC | AAGG |
| 175 | EXON51 | SLUCAS9 | + | GGTACCTCCAACATCAAGGAAG | ATGG |
| 176 | EXON51 | SLUCAS9 | + | CAAGGAAGATGGCATTTCTAGT | TTGG |
| 177 | EXON51 | SLUCAS9 | + | AGATGGCATTTCTAGTTTGGAG | ATGG |
| 178 | EXON51 | SLUCAS9 | + | ATGGCAGTTTCCTTAGTAACCA | CAGG |
| 179 | EXON51 | SLUCAS9 | + | GTCACCAGAGTAACAGTCTGAG | TAGG |
| 180 | EXON51 | SLUCAS9 | + | TCTGAGTAGGAGCTAAAATATT | TTGG |
| 181 | EXON51 | SLUCAS9 | + | CTGAGTAGGAGCTAAAATATTT | TGGG |
| 182 | EXON51 | SLUCAS9 | + | AAATATTTTGGGTTTTTGCAAA | AAGG |
| 183 | EXON51 | SLUCAS9 | − | GTATGAGAAAAAATGATAAAAG | TTGG |
| 184 | EXON51 | SLUCAS9 | − | CAACGAGATGATCATCAAGCAG | AAGG |
| 185 | EXON51 | SLUCAS9 | − | GAGGGTGATGGTGGGTGACCTT | GAGG |
| 186 | EXON51 | SLUCAS9 | − | ATAAAATCACAGAGGGTGATGG | TGGG |
| 187 | EXON51 | SLUCAS9 | − | TATAAAATCACAGAGGGTGATG | GTGG |
| 188 | EXON51 | SLUCAS9 | − | AGTTATAAAATCACAGAGGGTG | ATGG |
| 189 | EXON51 | SLUCAS9 | − | TGATCAAGTTATAAAATCACAG | AGGG |
| 190 | EXON51 | SLUCAS9 | − | TTGATCAAGTTATAAAATCACA | GAGG |
| 191 | EXON51 | SLUCAS9 | − | GGGCTTGGACAGAACTTACCGA | CTGG |
| 192 | EXON51 | SLUCAS9 | − | CTCTGGCAGATTTCAACCGGGC | TTGG |
| 193 | EXON51 | SLUCAS9 | − | ACCTGCTCTGGCAGATTTCAAC | CGGG |
| 194 | EXON51 | SLUCAS9 | − | TACCTGCTCTGGCAGATTTCAA | CCGG |
| 195 | EXON51 | SLUCAS9 | − | CTTGATGTTGGAGGTACCTGCT | CTGG |
| 196 | EXON51 | SLUCAS9 | − | AATGCCATCTTCCTTGATGTTG | GAGG |
| 197 | EXON51 | SLUCAS9 | − | AGAAATGCCATCTTCCTTGATG | TTGG |
| 198 | EXON51 | SLUCAS9 | − | GGTGACACAACCTGTGGTTACT | AAGG |
| 199 | EXON51 | SLUCAS9 | − | TGTTACTCTGGTGACACAACCT | GTGG |
| 200 | EXON51 | SLUCAS9 | − | AGCTCCTACTCAGACTGTTACT | CTGG |
| 201 | EXON53 | SLUCAS9 | + | AAAGGTATCTTTGATACTAACC | TTGG |
| 202 | EXON53 | SLUCAS9 | + | CCTTGGTTTCTGTGATTTTCTT | TTGG |
| 203 | EXON53 | SLUCAS9 | + | CTTTTGGATTGCATCTACTGTA | TAGG |
| 204 | EXON53 | SLUCAS9 | + | TTTTGGATTGCATCTACTGTAT | AGGG |
| 205 | EXON53 | SLUCAS9 | + | ACCCTCCTTCCATGACTCAAGC | TTGG |
| 206 | EXON53 | SLUCAS9 | + | CTTCCATGACTCAAGCTTGGCT | CTGG |
| 207 | EXON53 | SLUCAS9 | + | ACATTTCATTCAACTGTTGCCT | CCGG |
| 208 | EXON53 | SLUCAS9 | + | TCAACTGTTGCCTCCGGTTCTG | AAGG |
| 209 | EXON53 | SLUCAS9 | + | TGAATTCTTTCAACTAGAATAA | AAGG |
| 210 | EXON53 | SLUCAS9 | − | CCAAAAGAAAATCACAGAAACC | AAGG |
| 211 | EXON53 | SLUCAS9 | − | GCCAAGCTTGAGTCATGGAAGG | AGGG |
| 212 | EXON53 | SLUCAS9 | − | AGCCAAGCTTGAGTCATGGAAG | GAGG |
| 213 | EXON53 | SLUCAS9 | − | CAGAGCCAAGCTTGAGTCATGG | AAGG |
| 214 | EXON53 | SLUCAS9 | − | AGGCCAGAGCCAAGCTTGAGTC | ATGG |
| 215 | EXON53 | SLUCAS9 | − | AGAAGCTGAGCAGGTCTTAGGA | CAGG |
| 216 | EXON53 | SLUCAS9 | − | AAGGAAGAAGCTGAGCAGGTCT | TAGG |
| 217 | EXON53 | SLUCAS9 | − | GGAAGCTAAGGAAGAAGCTGAG | CAGG |
| 218 | EXON53 | SLUCAS9 | − | TTCAACACAATGGCTGGAAGCT | AAGG |
| 219 | EXON53 | SLUCAS9 | − | GTTAAAGGATTCAACACAATGG | CTGG |
| 220 | EXON53 | SLUCAS9 | − | AAATGTTAAAGGATTCAACACA | ATGG |
| 221 | EXON53 | SLUCAS9 | − | GCAACAGTTGAATGAAATGTTA | AAGG |
| 222 | EXON53 | SLUCAS9 | − | TACAAGAACACCTTCAGAACCG | GAGG |
| 223 | EXON53 | SLUCAS9 | − | AAGTACAAGAACACCTTCAGAA | CCGG |
| 224 | EXON53 | SLUCAS9 | − | AGTTGAAAGAATTCAGAATCAG | TGGG |
| 225 | EXON53 | SLUCAS9 | − | TAGTTGAAAGAATTCAGAATCA | GTGG |

TABLE 1B
Exemplary DMD guide sequences (20-nucleotides and 21-nucleotides)

| Sequence | | | | |
|---|---|---|---|---|
| ID No. of | | | | |
| Guide | | | | |
| Sequence | EXON | CAS9 | Strand | Guide sequence |
| 3000 | EXON43 | SACAS9 | + | AATGCTGCTGTCTTCTTGCT |
| 3001 | EXON43 | SACAS9 | + | CAATGCTGCTGTCTTCTTGCT |
| 1 | EXON43 | SACAS9 | + | GCAATGCTGCTGTCTTCTTGCT |
| 3002 | EXON43 | SACAS9 | − | AACAAAATGTACAAGGACCG |
| 3003 | EXON43 | SACAS9 | − | AACAAAATGTACAAGGACCGA |
| 2 | EXON43 | SACAS9 | − | AACAAAATGTACAAGGACCGAC |
| 3004 | EXON43 | SACAS9 | − | TGCAAAGTGCAACGCCTGTG |
| 3005 | EXON43 | SACAS9 | − | TGCAAAGTGCAACGCCTGTGG |
| 3 | EXON43 | SACAS9 | − | TGCAAAGTGCAACGCCTGTGGA |
| 3006 | EXON43 | SACAS9 | − | ATAGTCTACAACAAAGCTCA |
| 3007 | EXON43 | SACAS9 | − | ATAGTCTACAACAAAGCTCAG |
| 4 | EXON43 | SACAS9 | − | ATAGTCTACAACAAAGCTCAGG |
| 3008 | EXON43 | SACAS9 | − | CTGTTTTAAAATTTTTATAT |
| 3009 | EXON43 | SACAS9 | − | CTGTTTTAAAATTTTTATATT |
| 5 | EXON43 | SACAS9 | − | CTGTTTTAAAATTTTTATATTA |
| 3010 | EXON44 | SACAS9 | + | TTAGCATGTTCCCAATTCTC |
| 3011 | EXON44 | SACAS9 | + | TTTAGCATGTTCCCAATTCTC |
| 6 | EXON44 | SACAS9 | + | ATTTAGCATGTTCCCAATTCTC |
| 3012 | EXON44 | SACAS9 | + | TCGCCTGCAGGTAAAAGCAT |
| 3013 | EXON44 | SACAS9 | + | ATCGCCTGCAGGTAAAAGCAT |
| 7 | EXON44 | SACAS9 | + | AATCGCCTGCAGGTAAAAGCAT |
| 3014 | EXON44 | SACAS9 | − | TCTCAGAAAGACACAAATTC |
| 3015 | EXON44 | SACAS9 | − | TCTCAGAAAGACACAAATTCC |
| 8 | EXON44 | SACAS9 | − | TCTCAGAAAGACACAAATTCCT |
| 3016 | EXON45 | SACAS9 | + | AGGCTTCCCAATTTTTCCTG |
| 3017 | EXON45 | SACAS9 | + | CAGGCTTCCCAATTTTTCCTG |
| 9 | EXON45 | SACAS9 | + | TCAGGCTTCCCAATTTTTCCTG |
| 3018 | EXON45 | SACAS9 | + | GAATACTGGCATCTGTTTTT |
| 3019 | EXON45 | SACAS9 | + | AGAATACTGGCATCTGTTTTT |
| 10 | EXON45 | SACAS9 | + | TAGAATACTGGCATCTGTTTTT |
| 3020 | EXON45 | SACAS9 | + | GCATCTGTTTTTGAGGATTG |
| 3021 | EXON45 | SACAS9 | + | GGCATCTGTTTTTGAGGATTG |
| 11 | EXON45 | SACAS9 | + | TGGCATCTGTTTTTGAGGATTG |
| 3022 | EXON45 | SACAS9 | + | GCCGCTGCCCAATGCCATCC |
| 3023 | EXON45 | SACAS9 | + | TGCCGCTGCCCAATGCCATCC |
| 12 | EXON45 | SACAS9 | + | TTGCCGCTGCCCAATGCCATCC |
| 3024 | EXON45 | SACAS9 | − | GAGGTAGGGCGACAGATCTA |
| 3025 | EXON45 | SACAS9 | − | GAGGTAGGGCGACAGATCTAA |
| 13 | EXON45 | SACAS9 | − | GAGGTAGGGCGACAGATCTAAT |
| 3026 | EXON45 | SACAS9 | − | TCTACAGGAAAAATTGGGAA |
| 3027 | EXON45 | SACAS9 | − | TCTACAGGAAAAATTGGGAAG |
| 14 | EXON45 | SACAS9 | − | TCTACAGGAAAAATTGGGAAGC |
| 3028 | EXON45 | SACAS9 | − | GCGGCAAACTGTTGTCAGAA |
| 3029 | EXON45 | SACAS9 | − | GCGGCAAACTGTTGTCAGAAC |
| 15 | EXON45 | SACAS9 | − | GCGGCAAACTGTTGTCAGAACA |
| 3030 | EXON45 | SACAS9 | − | TTTTGGTATCTTACAGGAAC |
| 3031 | EXON45 | SACAS9 | − | TTTTGGTATCTTACAGGAACT |
| 16 | EXON45 | SACAS9 | − | TTTTGGTATCTTACAGGAACTC |
| 3032 | EXON50 | SACAS9 | − | ACTATTGGAGCCTGTAAGTA |
| 3033 | EXON50 | SACAS9 | − | ACTATTGGAGCCTGTAAGTAT |
| 17 | EXON50 | SACAS9 | − | ACTATTGGAGCCTGTAAGTATA |
| 3034 | EXON50 | SACAS9 | − | AGGAAGTTAGAAGATCTGAG |
| 3035 | EXON50 | SACAS9 | − | AGGAAGTTAGAAGATCTGAGC |
| 18 | EXON50 | SACAS9 | − | AGGAAGTTAGAAGATCTGAGCT |
| 3036 | EXON51 | SACAS9 | + | GTAACCACAGGTTGTGTCAC |
| 3037 | EXON51 | SACAS9 | + | AGTAACCACAGGTTGTGTCAC |
| 19 | EXON51 | SACAS9 | + | TAGTAACCACAGGTTGTGTCAC |
| 3038 | EXON51 | SACAS9 | + | TGTGTCACCAGAGTAACAGT |
| 3039 | EXON51 | SACAS9 | + | TTGTGTCACCAGAGTAACAGT |
| 20 | EXON51 | SACAS9 | + | GTTGTGTCACCAGAGTAACAGT |
| 3040 | EXON51 | SACAS9 | + | TGAGTAGGAGCTAAAATATT |
| 3041 | EXON51 | SACAS9 | + | CTGAGTAGGAGCTAAAATATT |
| 21 | EXON51 | SACAS9 | + | TCTGAGTAGGAGCTAAAATATT |
| 3042 | EXON51 | SACAS9 | − | GAGGGTGATGGTGGGTGACC |
| 3043 | EXON51 | SACAS9 | − | GAGGGTGATGGTGGGTGACCT |
| 22 | EXON51 | SACAS9 | − | GAGGGTGATGGTGGGTGACCTT |
| 3044 | EXON51 | SACAS9 | − | TATAAAATCACAGAGGGTGA |
| 3045 | EXON51 | SACAS9 | − | TATAAAATCACAGAGGGTGAT |
| 23 | EXON51 | SACAS9 | − | TATAAAATCACAGAGGGTGATG |
| 3046 | EXON51 | SACAS9 | − | TTGATCAAGTTATAAAATCA |
| 3047 | EXON51 | SACAS9 | − | TTGATCAAGTTATAAAATCAC |
| 24 | EXON51 | SACAS9 | − | TTGATCAAGTTATAAAATCACA |
| 3048 | EXON53 | SACAS9 | + | TTGGTTTCTGTGATTTTCTT |
| 3049 | EXON53 | SACAS9 | + | CTTGGTTTCTGTGATTTTCTT |
| 25 | EXON53 | SACAS9 | + | CCTTGGTTTCTGTGATTTTCTT |
| 3050 | EXON53 | SACAS9 | + | CTTAGCTTCCAGCCATTGTG |
| 3051 | EXON53 | SACAS9 | + | CCTTAGCTTCCAGCCATTGTG |
| 26 | EXON53 | SACAS9 | + | TCCTTAGCTTCCAGCCATTGTG |
| 3052 | EXON53 | SACAS9 | + | TGTACTTCATCCCACTGATT |
| 3053 | EXON53 | SACAS9 | + | TTGTACTTCATCCCACTGATT |
| 27 | EXON53 | SACAS9 | + | CTTGTACTTCATCCCACTGATT |
| 3054 | EXON53 | SACAS9 | + | TGATTCTGAATTCTTTCAAC |
| 3055 | EXON53 | SACAS9 | + | CTGATTCTGAATTCTTTCAAC |
| 28 | EXON53 | SACAS9 | + | ACTGATTCTGAATTCTTTCAAC |
| 3056 | EXON53 | SACAS9 | − | AGCCAAGCTTGAGTCATGGA |
| 3057 | EXON53 | SACAS9 | − | AGCCAAGCTTGAGTCATGGAA |
| 29 | EXON53 | SACAS9 | − | AGCCAAGCTTGAGTCATGGAAG |
| 3058 | EXON53 | SACAS9 | − | TTAGGACAGGCCAGAGCCAA |
| 3059 | EXON53 | SACAS9 | − | TTAGGACAGGCCAGAGCCAAG |
| 30 | EXON53 | SACAS9 | − | TTAGGACAGGCCAGAGCCAAGC |
| 3060 | EXON53 | SACAS9 | − | GCAACAGTTGAATGAAATGT |
| 3061 | EXON53 | SACAS9 | − | GCAACAGTTGAATGAAATGTT |
| 31 | EXON53 | SACAS9 | − | GCAACAGTTGAATGAAATGTTA |
| 3062 | EXON53 | SACAS9 | − | CCTTCAGAACCGGAGGCAAC |
| 3063 | EXON53 | SACAS9 | − | CCTTCAGAACCGGAGGCAACA |
| 32 | EXON53 | SACAS9 | − | CCTTCAGAACCGGAGGCAACAG |
| 3064 | EXON53 | SACAS9 | − | AGTTGAAAGAATTCAGAATC |
| 3065 | EXON53 | SACAS9 | − | AGTTGAAAGAATTCAGAATCA |
| 33 | EXON53 | SACAS9 | − | AGTTGAAAGAATTCAGAATCAG |
| 3066 | EXON53 | SACAS9 | − | TTTTATTCTAGTTGAAAGAA |
| 3067 | EXON53 | SACAS9 | − | TTTTATTCTAGTTGAAAGAAT |
| 34 | EXON53 | SACAS9 | − | TTTTATTCTAGTTGAAAGAATT |
| 3068 | EXON53 | SACAS9 | − | TTTTTCCTTTTATTCTAGTT |
| 3069 | EXON53 | SACAS9 | − | TTTTTCCTTTTATTCTAGTTG |
| 35 | EXON53 | SACAS9 | − | TTTTTCCTTTTATTCTAGTTGA |
| 4000 | EXON43 | SLUCAS9 | + | ATATGTGTTACCTACCCTTG |
| 4001 | EXON43 | SLUCAS9 | + | TATATGTGTTACCTACCCTTG |
| 100 | EXON43 | SLUCAS9 | + | ATATATGTGTTACCTACCCTTG |
| 4002 | EXON43 | SLUCAS9 | + | ATTTTGTTAACTTTTTCCCA |
| 4003 | EXON43 | SLUCAS9 | + | CATTTTGTTAACTTTTTCCCA |
| 101 | EXON43 | SLUCAS9 | + | ACATTTTGTTAACTTTTTCCCA |
| 4004 | EXON43 | SLUCAS9 | + | TTTTCCCATTGGAAATCAAG |
| 4005 | EXON43 | SLUCAS9 | + | TTTTTCCCATTGGAAATCAAG |
| 102 | EXON43 | SLUCAS9 | + | CTTTTTCCCATTGGAAATCAAG |
| 4006 | EXON43 | SLUCAS9 | + | TTTCCCATTGGAAATCAAGC |
| 4007 | EXON43 | SLUCAS9 | + | TTTTCCCATTGGAAATCAAGC |
| 103 | EXON43 | SLUCAS9 | + | TTTTTCCCATTGGAAATCAAGC |
| 4008 | EXON43 | SLUCAS9 | + | CTGTAGCTTCACCCTTTCCA |
| 4009 | EXON43 | SLUCAS9 | + | CCTGTAGCTTCACCCTTTCCA |
| 104 | EXON43 | SLUCAS9 | + | TCCTGTAGCTTCACCCTTTCCA |
| 4010 | EXON43 | SLUCAS9 | − | AATGTACAAGGACCGACAAG |
| 4011 | EXON43 | SLUCAS9 | − | AATGTACAAGGACCGACAAGG |
| 105 | EXON43 | SLUCAS9 | − | AATGTACAAGGACCGACAAGGG |
| 4012 | EXON43 | SLUCAS9 | − | ACAAAATGTACAAGGACCGA |
| 4013 | EXON43 | SLUCAS9 | − | ACAAAATGTACAAGGACCGAC |
| 106 | EXON43 | SLUCAS9 | − | ACAAAATGTACAAGGACCGACA |
| 4014 | EXON43 | SLUCAS9 | − | AACAAAATGTACAAGGACCG |
| 4015 | EXON43 | SLUCAS9 | − | AACAAAATGTACAAGGACCGA |
| 107 | EXON43 | SLUCAS9 | − | AACAAAATGTACAAGGACCGAC |
| 4016 | EXON43 | SLUCAS9 | − | GGAAAAAGTTAACAAAATGT |
| 4017 | EXON43 | SLUCAS9 | − | GGAAAAAGTTAACAAAATGTA |
| 108 | EXON43 | SLUCAS9 | − | GGAAAAAGTTAACAAAATGTAC |
| 4018 | EXON43 | SLUCAS9 | − | TCTCTCCCAGCTTGATTTCC |
| 4019 | EXON43 | SLUCAS9 | − | TCTCTCCCAGCTTGATTTCCA |
| 109 | EXON43 | SLUCAS9 | − | TCTCTCCCAGCTTGATTTCCAA |
| 4020 | EXON43 | SLUCAS9 | − | CTCTCTCCCAGCTTGATTTC |
| 4021 | EXON43 | SLUCAS9 | − | CTCTCTCCCAGCTTGATTTCC |
| 110 | EXON43 | SLUCAS9 | − | CTCTCTCCCAGCTTGATTTCCA |
| 4022 | EXON43 | SLUCAS9 | − | GCCTGTGGAAAGGGTGAAGC |
| 4023 | EXON43 | SLUCAS9 | − | GCCTGTGGAAAGGGTGAAGCT |
| 111 | EXON43 | SLUCAS9 | − | GCCTGTGGAAAGGGTGAAGCTA |
| 4024 | EXON43 | SLUCAS9 | − | GCAAAGTGCAACGCCTGTGG |
| 4025 | EXON43 | SLUCAS9 | − | GCAAAGTGCAACGCCTGTGGA |
| 112 | EXON43 | SLUCAS9 | − | GCAAAGTGCAACGCCTGTGGAA |
| 4026 | EXON43 | SLUCAS9 | − | TGCAAAGTGCAACGCCTGTG |
| 4027 | EXON43 | SLUCAS9 | − | TGCAAAGTGCAACGCCTGTGG |
| 113 | EXON43 | SLUCAS9 | − | TGCAAAGTGCAACGCCTGTGGA |
| 4028 | EXON43 | SLUCAS9 | − | AGCATTGCAAAGTGCAACGC |
| 4029 | EXON43 | SLUCAS9 | − | AGCATTGCAAAGTGCAACGCC |
| 114 | EXON43 | SLUCAS9 | − | AGCATTGCAAAGTGCAACGCCT |
| 4030 | EXON43 | SLUCAS9 | − | ATAGTCTACAACAAAGCTCA |
| 4031 | EXON43 | SLUCAS9 | − | ATAGTCTACAACAAAGCTCAG |
| 115 | EXON43 | SLUCAS9 | − | ATAGTCTACAACAAAGCTCAGG |
| 4032 | EXON43 | SLUCAS9 | − | AAAGATAGTCTACAACAAAG |
| 4033 | EXON43 | SLUCAS9 | − | AAAGATAGTCTACAACAAAGC |
| 116 | EXON43 | SLUCAS9 | − | AAAGATAGTCTACAACAAAGCT |
| 4034 | EXON44 | SLUCAS9 | + | TTTAGCATGTTCCCAATTCT |
| 4035 | EXON44 | SLUCAS9 | + | ATTTAGCATGTTCCCAATTCT |
| 117 | EXON44 | SLUCAS9 | + | TATTTAGCATGTTCCCAATTCT |
| 4036 | EXON44 | SLUCAS9 | + | CAGATCTGTCAAATCGCCTG |
| 4037 | EXON44 | SLUCAS9 | + | ACAGATCTGTCAAATCGCCTG |
| 118 | EXON44 | SLUCAS9 | + | AACAGATCTGTCAAATCGCCTG |
| 4038 | EXON44 | SLUCAS9 | + | TCGCCTGCAGGTAAAAGCAT |
| 4039 | EXON44 | SLUCAS9 | + | ATCGCCTGCAGGTAAAAGCAT |
| 119 | EXON44 | SLUCAS9 | + | AATCGCCTGCAGGTAAAAGCAT |
| 4040 | EXON44 | SLUCAS9 | − | TGCTAAATACAAATGGTATC |
| 4041 | EXON44 | SLUCAS9 | − | TGCTAAATACAAATGGTATCT |
| 120 | EXON44 | SLUCAS9 | − | TGCTAAATACAAATGGTATCTT |
| 4042 | EXON44 | SLUCAS9 | − | ATTGGGAACATGCTAAATAC |
| 4043 | EXON44 | SLUCAS9 | − | ATTGGGAACATGCTAAATACA |
| 121 | EXON44 | SLUCAS9 | − | ATTGGGAACATGCTAAATACAA |
| 4044 | EXON44 | SLUCAS9 | − | AAAGACACAAATTCCTGAGA |
| 4045 | EXON44 | SLUCAS9 | − | AAAGACACAAATTCCTGAGAA |
| 122 | EXON44 | SLUCAS9 | − | AAAGACACAAATTCCTGAGAAT |
| 4046 | EXON44 | SLUCAS9 | − | GAAAGACACAAATTCCTGAG |
| 4047 | EXON44 | SLUCAS9 | − | GAAAGACACAAATTCCTGAGA |
| 123 | EXON44 | SLUCAS9 | − | GAAAGACACAAATTCCTGAGAA |
| 4048 | EXON44 | SLUCAS9 | − | ATGATATAAAGATATTTAAT |
| 4049 | EXON44 | SLUCAS9 | − | ATGATATAAAGATATTTAATC |
| 124 | EXON44 | SLUCAS9 | − | ATGATATAAAGATATTTAATCA |
| 4050 | EXON44 | SLUCAS9 | − | TTGACAGATCTGTTGAGAAA |
| 4051 | EXON44 | SLUCAS9 | − | TTGACAGATCTGTTGAGAAAT |
| 125 | EXON44 | SLUCAS9 | − | TTGACAGATCTGTTGAGAAATG |
| 4052 | EXON44 | SLUCAS9 | − | GATTTGACAGATCTGTTGAG |
| 4053 | EXON44 | SLUCAS9 | − | GATTTGACAGATCTGTTGAGA |
| 126 | EXON44 | SLUCAS9 | − | GATTTGACAGATCTGTTGAGAA |
| 4054 | EXON44 | SLUCAS9 | − | TTGATCCATATGCTTTTACC |
| 4055 | EXON44 | SLUCAS9 | − | TTGATCCATATGCTTTTACCT |
| 127 | EXON44 | SLUCAS9 | − | TTGATCCATATGCTTTTACCTG |
| 4056 | EXON45 | SLUCAS9 | + | ACCTCCTGCCACCGCAGATT |
| 4057 | EXON45 | SLUCAS9 | + | GACCTCCTGCCACCGCAGATT |
| 128 | EXON45 | SLUCAS9 | + | AGACCTCCTGCCACCGCAGATT |
| 4058 | EXON45 | SLUCAS9 | + | CCAATTTTTCCTGTAGAATA |
| 4059 | EXON45 | SLUCAS9 | + | CCCAATTTTTCCTGTAGAATA |
| 129 | EXON45 | SLUCAS9 | + | TCCCAATTTTTCCTGTAGAATA |
| 4060 | EXON45 | SLUCAS9 | + | GAATACTGGCATCTGTTTTT |
| 4061 | EXON45 | SLUCAS9 | + | AGAATACTGGCATCTGTTTTT |
| 130 | EXON45 | SLUCAS9 | + | TAGAATACTGGCATCTGTTTTT |
| 4062 | EXON45 | SLUCAS9 | + | TGCCGCTGCCCAATGCCATC |
| 4063 | EXON45 | SLUCAS9 | + | TTGCCGCTGCCCAATGCCATC |
| 131 | EXON45 | SLUCAS9 | + | TTTGCCGCTGCCCAATGCCATC |
| 4064 | EXON45 | SLUCAS9 | + | AGTTCCTGTAAGATACCAAA |
| 4065 | EXON45 | SLUCAS9 | + | GAGTTCCTGTAAGATACCAAA |
| 132 | EXON45 | SLUCAS9 | + | GGAGTTCCTGTAAGATACCAAA |
| 4066 | EXON45 | SLUCAS9 | − | AGAGGTAGGGCGACAGATCT |
| 4067 | EXON45 | SLUCAS9 | − | AGAGGTAGGGCGACAGATCTA |
| 133 | EXON45 | SLUCAS9 | − | AGAGGTAGGGCGACAGATCTAA |
| 4068 | EXON45 | SLUCAS9 | − | CTGTCAGACAGAAAAAAGAG |
| 4069 | EXON45 | SLUCAS9 | − | CTGTCAGACAGAAAAAAGAGG |
| 134 | EXON45 | SLUCAS9 | − | CTGTCAGACAGAAAAAAGAGGT |
| 4070 | EXON45 | SLUCAS9 | − | GCTGTCAGACAGAAAAAAGA |
| 4071 | EXON45 | SLUCAS9 | − | GCTGTCAGACAGAAAAAAGAG |
| 135 | EXON45 | SLUCAS9 | − | GCTGTCAGACAGAAAAAAGAGG |
| 4072 | EXON45 | SLUCAS9 | − | AACAGCTGTCAGACAGAAAA |
| 4073 | EXON45 | SLUCAS9 | − | AACAGCTGTCAGACAGAAAAA |
| 136 | EXON45 | SLUCAS9 | − | AACAGCTGTCAGACAGAAAAAA |
| 4074 | EXON45 | SLUCAS9 | − | AAGCCTGAATCTGCGGTGGC |
| 4075 | EXON45 | SLUCAS9 | − | AAGCCTGAATCTGCGGTGGCA |
| 137 | EXON45 | SLUCAS9 | − | AAGCCTGAATCTGCGGTGGCAG |
| 4076 | EXON45 | SLUCAS9 | − | GGGAAGCCTGAATCTGCGGT |
| 4077 | EXON45 | SLUCAS9 | − | GGGAAGCCTGAATCTGCGGTG |
| 138 | EXON45 | SLUCAS9 | − | GGGAAGCCTGAATCTGCGGTGG |
| 4078 | EXON45 | SLUCAS9 | − | AATTGGGAAGCCTGAATCTG |
| 4079 | EXON45 | SLUCAS9 | − | AATTGGGAAGCCTGAATCTGC |
| 139 | EXON45 | SLUCAS9 | − | AATTGGGAAGCCTGAATCTGCG |
| 4080 | EXON45 | SLUCAS9 | − | AAAAATTGGGAAGCCTGAAT |
| 4081 | EXON45 | SLUCAS9 | − | AAAAATTGGGAAGCCTGAATC |
| 140 | EXON45 | SLUCAS9 | − | AAAAATTGGGAAGCCTGAATCT |
| 4082 | EXON45 | SLUCAS9 | − | GCCAGTATTCTACAGGAAAA |
| 4083 | EXON45 | SLUCAS9 | − | GCCAGTATTCTACAGGAAAAA |
| 141 | EXON45 | SLUCAS9 | − | GCCAGTATTCTACAGGAAAAAT |
| 4084 | EXON45 | SLUCAS9 | − | TGCCAGTATTCTACAGGAAA |
| 4085 | EXON45 | SLUCAS9 | − | TGCCAGTATTCTACAGGAAAA |
| 142 | EXON45 | SLUCAS9 | − | TGCCAGTATTCTACAGGAAAAA |
| 4086 | EXON45 | SLUCAS9 | − | AAAAACAGATGCCAGTATTC |
| 4087 | EXON45 | SLUCAS9 | − | AAAAACAGATGCCAGTATTCT |
| 143 | EXON45 | SLUCAS9 | − | AAAAACAGATGCCAGTATTCTA |
| 4088 | EXON45 | SLUCAS9 | − | TGTCAGAACATTGAATGCAA |
| 4089 | EXON45 | SLUCAS9 | − | TGTCAGAACATTGAATGCAAC |
| 144 | EXON45 | SLUCAS9 | − | TGTCAGAACATTGAATGCAACT |
| 4090 | EXON45 | SLUCAS9 | − | TTGTCAGAACATTGAATGCA |
| 4091 | EXON45 | SLUCAS9 | − | TTGTCAGAACATTGAATGCAA |
| 145 | EXON45 | SLUCAS9 | − | TTGTCAGAACATTGAATGCAAC |
| 4092 | EXON45 | SLUCAS9 | − | GTTGTCAGAACATTGAATGC |
| 4093 | EXON45 | SLUCAS9 | − | GTTGTCAGAACATTGAATGCA |
| 146 | EXON45 | SLUCAS9 | − | GTTGTCAGAACATTGAATGCAA |
| 4094 | EXON45 | SLUCAS9 | − | AACTCCAGGATGGCATTGGG |
| 4095 | EXON45 | SLUCAS9 | − | AACTCCAGGATGGCATTGGGC |
| 147 | EXON45 | SLUCAS9 | − | AACTCCAGGATGGCATTGGGCA |
| 4096 | EXON45 | SLUCAS9 | − | TACAGGAACTCCAGGATGGC |
| 4097 | EXON45 | SLUCAS9 | − | TACAGGAACTCCAGGATGGCA |
| 148 | EXON45 | SLUCAS9 | − | TACAGGAACTCCAGGATGGCAT |
| 4098 | EXON45 | SLUCAS9 | − | TTACAGGAACTCCAGGATGG |
| 4099 | EXON45 | SLUCAS9 | − | TTACAGGAACTCCAGGATGGC |
| 149 | EXON45 | SLUCAS9 | − | TTACAGGAACTCCAGGATGGCA |
| 4100 | EXON45 | SLUCAS9 | − | GGTATCTTACAGGAACTCCA |
| 4101 | EXON45 | SLUCAS9 | − | GGTATCTTACAGGAACTCCAG |
| 150 | EXON45 | SLUCAS9 | − | GGTATCTTACAGGAACTCCAGG |
| 4102 | EXON45 | SLUCAS9 | − | TTTTGGTATCTTACAGGAAC |
| 4103 | EXON45 | SLUCAS9 | − | TTTTGGTATCTTACAGGAACT |
| 151 | EXON45 | SLUCAS9 | − | TTTTGGTATCTTACAGGAACTC |
| 4104 | EXON45 | SLUCAS9 | − | GTTTTGCCTTTTTGGTATCT |
| 4105 | EXON45 | SLUCAS9 | − | GTTTTGCCTTTTTGGTATCTT |
| 152 | EXON45 | SLUCAS9 | − | GTTTTGCCTTTTTGGTATCTTA |
| 4106 | EXON45 | SLUCAS9 | − | TCTTTTCTCAAATAAAAAGA |
| 4107 | EXON45 | SLUCAS9 | − | TCTTTTCTCAAATAAAAAGAC |
| 153 | EXON45 | SLUCAS9 | − | TCTTTTCTCAAATAAAAAGACA |
| 4108 | EXON50 | SLUCAS9 | + | AATGGGATCCAGTATACTTA |
| 4109 | EXON50 | SLUCAS9 | + | GAATGGGATCCAGTATACTTA |
| 154 | EXON50 | SLUCAS9 | + | AGAATGGGATCCAGTATACTTA |
| 4110 | EXON50 | SLUCAS9 | + | TATACTTACAGGCTCCAATA |
| 4111 | EXON50 | SLUCAS9 | + | GTATACTTACAGGCTCCAATA |
| 155 | EXON50 | SLUCAS9 | + | AGTATACTTACAGGCTCCAATA |
| 4112 | EXON50 | SLUCAS9 | + | GGCTCCAATAGTGGTCAGTC |
| 4113 | EXON50 | SLUCAS9 | + | AGGCTCCAATAGTGGTCAGTC |
| 156 | EXON50 | SLUCAS9 | + | CAGGCTCCAATAGTGGTCAGTC |
| 4114 | EXON50 | SLUCAS9 | + | ATAGTGGTCAGTCCAGGAGC |
| 4115 | EXON50 | SLUCAS9 | + | AATAGTGGTCAGTCCAGGAGC |
| 157 | EXON50 | SLUCAS9 | + | CAATAGTGGTCAGTCCAGGAGC |
| 4116 | EXON50 | SLUCAS9 | + | GGTCAGTCCAGGAGCTAGGT |
| 4117 | EXON50 | SLUCAS9 | + | TGGTCAGTCCAGGAGCTAGGT |
| 158 | EXON50 | SLUCAS9 | + | GTGGTCAGTCCAGGAGCTAGGT |
| 4118 | EXON50 | SLUCAS9 | + | GCCCTCAGCTCTTGAAGTAA |
| 4119 | EXON50 | SLUCAS9 | + | TGCCCTCAGCTCTTGAAGTAA |
| 159 | EXON50 | SLUCAS9 | + | TTGCCCTCAGCTCTTGAAGTAA |
| 4120 | EXON50 | SLUCAS9 | − | AGTATACTGGATCCCATTCT |
| 4121 | EXON50 | SLUCAS9 | − | AGTATACTGGATCCCATTCTC |
| 160 | EXON50 | SLUCAS9 | − | AGTATACTGGATCCCATTCTCT |
| 4122 | EXON50 | SLUCAS9 | − | ACTATTGGAGCCTGTAAGTA |
| 4123 | EXON50 | SLUCAS9 | − | ACTATTGGAGCCTGTAAGTAT |
| 161 | EXON50 | SLUCAS9 | − | ACTATTGGAGCCTGTAAGTATA |
| 4124 | EXON50 | SLUCAS9 | − | CTAGCTCCTGGACTGACCAC |
| 4125 | EXON50 | SLUCAS9 | − | CTAGCTCCTGGACTGACCACT |
| 162 | EXON50 | SLUCAS9 | − | CTAGCTCCTGGACTGACCACTA |
| 4126 | EXON50 | SLUCAS9 | − | GCAAAGCAGCCTGACCTAGC |
| 4127 | EXON50 | SLUCAS9 | − | GCAAAGCAGCCTGACCTAGCT |
| 163 | EXON50 | SLUCAS9 | − | GCAAAGCAGCCTGACCTAGCTC |
| 4128 | EXON50 | SLUCAS9 | − | AAACCGTTTACTTCAAGAGC |
| 4129 | EXON50 | SLUCAS9 | − | AAACCGTTTACTTCAAGAGCT |
| 164 | EXON50 | SLUCAS9 | − | AAACCGTTTACTTCAAGAGCTG |
| 4130 | EXON50 | SLUCAS9 | − | TAAACCGTTTACTTCAAGAG |
| 4131 | EXON50 | SLUCAS9 | − | TAAACCGTTTACTTCAAGAGC |
| 165 | EXON50 | SLUCAS9 | − | TAAACCGTTTACTTCAAGAGCT |
| 4132 | EXON50 | SLUCAS9 | − | AGATCTGAGCTCTGAGTGGA |
| 4133 | EXON50 | SLUCAS9 | − | AGATCTGAGCTCTGAGTGGAA |
| 166 | EXON50 | SLUCAS9 | − | AGATCTGAGCTCTGAGTGGAAG |
| 4134 | EXON50 | SLUCAS9 | − | AGAAGATCTGAGCTCTGAGT |
| 4135 | EXON50 | SLUCAS9 | − | AGAAGATCTGAGCTCTGAGTG |
| 167 | EXON50 | SLUCAS9 | − | AGAAGATCTGAGCTCTGAGTGG |
| 4136 | EXON50 | SLUCAS9 | − | AGTTAGAAGATCTGAGCTCT |
| 4137 | EXON50 | SLUCAS9 | − | AGTTAGAAGATCTGAGCTCTG |
| 168 | EXON50 | SLUCAS9 | − | AGTTAGAAGATCTGAGCTCTGA |
| 4138 | EXON50 | SLUCAS9 | − | ATGTGTATGCTTTTCTGTTA |
| 4139 | EXON50 | SLUCAS9 | − | ATGTGTATGCTTTTCTGTTAA |
| 169 | EXON50 | SLUCAS9 | − | ATGTGTATGCTTTTCTGTTAAA |
| 4140 | EXON51 | SLUCAS9 | + | ATCATCTCGTTGATATCCTC |
| 4141 | EXON51 | SLUCAS9 | + | GATCATCTCGTTGATATCCTC |
| 170 | EXON51 | SLUCAS9 | + | TGATCATCTCGTTGATATCCTC |
| 4142 | EXON51 | SLUCAS9 | + | GATCAAGCAGAGAAAGCCAG |
| 4143 | EXON51 | SLUCAS9 | + | TGATCAAGCAGAGAAAGCCAG |
| 171 | EXON51 | SLUCAS9 | + | TTGATCAAGCAGAGAAAGCCAG |
| 4144 | EXON51 | SLUCAS9 | + | TCGGTAAGTTCTGTCCAAGC |
| 4145 | EXON51 | SLUCAS9 | + | GTCGGTAAGTTCTGTCCAAGC |
| 172 | EXON51 | SLUCAS9 | + | AGTCGGTAAGTTCTGTCCAAGC |
| 4146 | EXON51 | SLUCAS9 | + | CCGGTTGAAATCTGCCAGAG |
| 4147 | EXON51 | SLUCAS9 | + | CCCGGTTGAAATCTGCCAGAG |
| 173 | EXON51 | SLUCAS9 | + | GCCCGGTTGAAATCTGCCAGAG |
| 4148 | EXON51 | SLUCAS9 | + | GAGCAGGTACCTCCAACATC |
| 4149 | EXON51 | SLUCAS9 | + | AGAGCAGGTACCTCCAACATC |
| 174 | EXON51 | SLUCAS9 | + | CAGAGCAGGTACCTCCAACATC |
| 4150 | EXON51 | SLUCAS9 | + | TACCTCCAACATCAAGGAAG |
| 4151 | EXON51 | SLUCAS9 | + | GTACCTCCAACATCAAGGAAG |
| 175 | EXON51 | SLUCAS9 | + | GGTACCTCCAACATCAAGGAAG |
| 4152 | EXON51 | SLUCAS9 | + | AGGAAGATGGCATTTCTAGT |
| 4153 | EXON51 | SLUCAS9 | + | AAGGAAGATGGCATTTCTAGT |
| 176 | EXON51 | SLUCAS9 | + | CAAGGAAGATGGCATTTCTAGT |
| 4154 | EXON51 | SLUCAS9 | + | ATGGCATTTCTAGTTTGGAG |
| 4155 | EXON51 | SLUCAS9 | + | GATGGCATTTCTAGTTTGGAG |
| 177 | EXON51 | SLUCAS9 | + | AGATGGCATTTCTAGTTTGGAG |
| 4156 | EXON51 | SLUCAS9 | + | GGCAGTTTCCTTAGTAACCA |
| 4157 | EXON51 | SLUCAS9 | + | TGGCAGTTTCCTTAGTAACCA |
| 178 | EXON51 | SLUCAS9 | + | ATGGCAGTTTCCTTAGTAACCA |
| 4158 | EXON51 | SLUCAS9 | + | CACCAGAGTAACAGTCTGAG |
| 4159 | EXON51 | SLUCAS9 | + | TCACCAGAGTAACAGTCTGAG |
| 179 | EXON51 | SLUCAS9 | + | GTCACCAGAGTAACAGTCTGAG |
| 4160 | EXON51 | SLUCAS9 | + | TGAGTAGGAGCTAAAATATT |
| 4161 | EXON51 | SLUCAS9 | + | CTGAGTAGGAGCTAAAATATT |
| 180 | EXON51 | SLUCAS9 | + | TCTGAGTAGGAGCTAAAATATT |
| 4162 | EXON51 | SLUCAS9 | + | GAGTAGGAGCTAAAATATTT |
| 4163 | EXON51 | SLUCAS9 | + | TGAGTAGGAGCTAAAATATTT |
| 181 | EXON51 | SLUCAS9 | + | CTGAGTAGGAGCTAAAATATTT |
| 4164 | EXON51 | SLUCAS9 | + | ATATTTTGGGTTTTTGCAAA |
| 4165 | EXON51 | SLUCAS9 | + | AATATTTTGGGTTTTTGCAAA |
| 182 | EXON51 | SLUCAS9 | + | AAATATTTTGGGTTTTTGCAAA |
| 4166 | EXON51 | SLUCAS9 | − | GTATGAGAAAAAATGATAAA |
| 4167 | EXON51 | SLUCAS9 | − | GTATGAGAAAAAATGATAAAA |
| 183 | EXON51 | SLUCAS9 | − | GTATGAGAAAAAATGATAAAAG |
| 4168 | EXON51 | SLUCAS9 | − | CAACGAGATGATCATCAAGC |
| 4169 | EXON51 | SLUCAS9 | − | CAACGAGATGATCATCAAGCA |
| 184 | EXON51 | SLUCAS9 | − | CAACGAGATGATCATCAAGCAG |
| 4170 | EXON51 | SLUCAS9 | − | GAGGGTGATGGTGGGTGACC |
| 4171 | EXON51 | SLUCAS9 | − | GAGGGTGATGGTGGGTGACCT |
| 185 | EXON51 | SLUCAS9 | − | GAGGGTGATGGTGGGTGACCTT |
| 4172 | EXON51 | SLUCAS9 | − | ATAAAATCACAGAGGGTGAT |
| 4173 | EXON51 | SLUCAS9 | − | ATAAAATCACAGAGGGTGATG |
| 186 | EXON51 | SLUCAS9 | − | ATAAAATCACAGAGGGTGATGG |
| 4174 | EXON51 | SLUCAS9 | − | TATAAAATCACAGAGGGTGA |
| 4175 | EXON51 | SLUCAS9 | − | TATAAAATCACAGAGGGTGAT |
| 187 | EXON51 | SLUCAS9 | − | TATAAAATCACAGAGGGTGATG |
| 4176 | EXON51 | SLUCAS9 | − | AGTTATAAAATCACAGAGGG |
| 4177 | EXON51 | SLUCAS9 | − | AGTTATAAAATCACAGAGGGT |
| 188 | EXON51 | SLUCAS9 | − | AGTTATAAAATCACAGAGGGTG |
| 4178 | EXON51 | SLUCAS9 | − | TGATCAAGTTATAAAATCAC |
| 4179 | EXON51 | SLUCAS9 | − | TGATCAAGTTATAAAATCACA |
| 189 | EXON51 | SLUCAS9 | − | TGATCAAGTTATAAAATCACAG |
| 4180 | EXON51 | SLUCAS9 | − | TTGATCAAGTTATAAAATCA |
| 4181 | EXON51 | SLUCAS9 | − | TTGATCAAGTTATAAAATCAC |
| 190 | EXON51 | SLUCAS9 | − | TTGATCAAGTTATAAAATCACA |
| 4182 | EXON51 | SLUCAS9 | − | GGGCTTGGACAGAACTTACC |
| 4183 | EXON51 | SLUCAS9 | − | GGGCTTGGACAGAACTTACCG |
| 191 | EXON51 | SLUCAS9 | − | GGGCTTGGACAGAACTTACCGA |
| 4184 | EXON51 | SLUCAS9 | − | CTCTGGCAGATTTCAACCGG |
| 4185 | EXON51 | SLUCAS9 | − | CTCTGGCAGATTTCAACCGGG |
| 192 | EXON51 | SLUCAS9 | − | CTCTGGCAGATTTCAACCGGGC |
| 4186 | EXON51 | SLUCAS9 | − | ACCTGCTCTGGCAGATTTCA |
| 4187 | EXON51 | SLUCAS9 | − | ACCTGCTCTGGCAGATTTCAA |
| 193 | EXON51 | SLUCAS9 | − | ACCTGCTCTGGCAGATTTCAAC |
| 4188 | EXON51 | SLUCAS9 | − | TACCTGCTCTGGCAGATTTC |
| 4189 | EXON51 | SLUCAS9 | − | TACCTGCTCTGGCAGATTTCA |
| 194 | EXON51 | SLUCAS9 | − | TACCTGCTCTGGCAGATTTCAA |
| 4190 | EXON51 | SLUCAS9 | − | CTTGATGTTGGAGGTACCTG |
| 4191 | EXON51 | SLUCAS9 | − | CTTGATGTTGGAGGTACCTGC |
| 195 | EXON51 | SLUCAS9 | − | CTTGATGTTGGAGGTACCTGCT |
| 4192 | EXON51 | SLUCAS9 | − | AATGCCATCTTCCTTGATGT |
| 4193 | EXON51 | SLUCAS9 | − | AATGCCATCTTCCTTGATGTT |
| 196 | EXON51 | SLUCAS9 | − | AATGCCATCTTCCTTGATGTTG |
| 4194 | EXON51 | SLUCAS9 | − | AGAAATGCCATCTTCCTTGA |
| 4195 | EXON51 | SLUCAS9 | − | AGAAATGCCATCTTCCTTGAT |
| 197 | EXON51 | SLUCAS9 | − | AGAAATGCCATCTTCCTTGATG |
| 4196 | EXON51 | SLUCAS9 | − | GGTGACACAACCTGTGGTTA |
| 4197 | EXON51 | SLUCAS9 | − | GGTGACACAACCTGTGGTTAC |
| 198 | EXON51 | SLUCAS9 | − | GGTGACACAACCTGTGGTTACT |
| 4198 | EXON51 | SLUCAS9 | − | TGTTACTCTGGTGACACAAC |
| 4199 | EXON51 | SLUCAS9 | − | TGTTACTCTGGTGACACAACC |
| 199 | EXON51 | SLUCAS9 | − | TGTTACTCTGGTGACACAACCT |
| 4200 | EXON51 | SLUCAS9 | − | AGCTCCTACTCAGACTGTTA |
| 4201 | EXON51 | SLUCAS9 | − | AGCTCCTACTCAGACTGTTAC |
| 200 | EXON51 | SLUCAS9 | − | AGCTCCTACTCAGACTGTTACT |
| 4202 | EXON53 | SLUCAS9 | + | AGGTATCTTTGATACTAACC |
| 4203 | EXON53 | SLUCAS9 | + | AAGGTATCTTTGATACTAACC |
| 201 | EXON53 | SLUCAS9 | + | AAAGGTATCTTTGATACTAACC |
| 4204 | EXON53 | SLUCAS9 | + | TTGGTTTCTGTGATTTTCTT |
| 4205 | EXON53 | SLUCAS9 | + | CTTGGTTTCTGTGATTTTCTT |
| 202 | EXON53 | SLUCAS9 | + | CCTTGGTTTCTGTGATTTTCTT |
| 4206 | EXON53 | SLUCAS9 | + | TTTGGATTGCATCTACTGTA |
| 4207 | EXON53 | SLUCAS9 | + | TTTTGGATTGCATCTACTGTA |
| 203 | EXON53 | SLUCAS9 | + | CTTTTGGATTGCATCTACTGTA |
| 4208 | EXON53 | SLUCAS9 | + | TTGGATTGCATCTACTGTAT |
| 4209 | EXON53 | SLUCAS9 | + | TTTGGATTGCATCTACTGTAT |
| 204 | EXON53 | SLUCAS9 | + | TTTTGGATTGCATCTACTGTAT |
| 4210 | EXON53 | SLUCAS9 | + | CCTCCTTCCATGACTCAAGC |
| 4211 | EXON53 | SLUCAS9 | + | CCCTCCTTCCATGACTCAAGC |
| 205 | EXON53 | SLUCAS9 | + | ACCCTCCTTCCATGACTCAAGC |
| 4212 | EXON53 | SLUCAS9 | + | TCCATGACTCAAGCTTGGCT |
| 4213 | EXON53 | SLUCAS9 | + | TTCCATGACTCAAGCTTGGCT |
| 206 | EXON53 | SLUCAS9 | + | CTTCCATGACTCAAGCTTGGCT |
| 4214 | EXON53 | SLUCAS9 | + | ATTTCATTCAACTGTTGCCT |
| 4215 | EXON53 | SLUCAS9 | + | CATTTCATTCAACTGTTGCCT |
| 207 | EXON53 | SLUCAS9 | + | ACATTTCATTCAACTGTTGCCT |
| 4216 | EXON53 | SLUCAS9 | + | AACTGTTGCCTCCGGTTCTG |
| 4217 | EXON53 | SLUCAS9 | + | CAACTGTTGCCTCCGGTTCTG |
| 208 | EXON53 | SLUCAS9 | + | TCAACTGTTGCCTCCGGTTCTG |
| 4218 | EXON53 | SLUCAS9 | + | AATTCTTTCAACTAGAATAA |
| 4219 | EXON53 | SLUCAS9 | + | GAATTCTTTCAACTAGAATAA |
| 209 | EXON53 | SLUCAS9 | + | TGAATTCTTTCAACTAGAATAA |
| 4220 | EXON53 | SLUCAS9 | − | CCAAAAGAAAATCACAGAAA |
| 4221 | EXON53 | SLUCAS9 | − | CCAAAAGAAAATCACAGAAAC |
| 210 | EXON53 | SLUCAS9 | − | CCAAAAGAAAATCACAGAAACC |
| 4222 | EXON53 | SLUCAS9 | − | GCCAAGCTTGAGTCATGGAA |
| 4223 | EXON53 | SLUCAS9 | − | GCCAAGCTTGAGTCATGGAAG |
| 211 | EXON53 | SLUCAS9 | − | GCCAAGCTTGAGTCATGGAAGG |
| 4224 | EXON53 | SLUCAS9 | − | AGCCAAGCTTGAGTCATGGA |
| 4225 | EXON53 | SLUCAS9 | − | AGCCAAGCTTGAGTCATGGAA |
| 212 | EXON53 | SLUCAS9 | − | AGCCAAGCTTGAGTCATGGAAG |
| 4226 | EXON53 | SLUCAS9 | − | CAGAGCCAAGCTTGAGTCAT |
| 4227 | EXON53 | SLUCAS9 | − | CAGAGCCAAGCTTGAGTCATG |
| 213 | EXON53 | SLUCAS9 | − | CAGAGCCAAGCTTGAGTCATGG |
| 4228 | EXON53 | SLUCAS9 | − | AGGCCAGAGCCAAGCTTGAG |
| 4229 | EXON53 | SLUCAS9 | − | AGGCCAGAGCCAAGCTTGAGT |
| 214 | EXON53 | SLUCAS9 | − | AGGCCAGAGCCAAGCTTGAGTC |
| 4230 | EXON53 | SLUCAS9 | − | AGAAGCTGAGCAGGTCTTAG |
| 4231 | EXON53 | SLUCAS9 | − | AGAAGCTGAGCAGGTCTTAGG |
| 215 | EXON53 | SLUCAS9 | − | AGAAGCTGAGCAGGTCTTAGGA |
| 4232 | EXON53 | SLUCAS9 | − | AAGGAAGAAGCTGAGCAGGT |
| 4233 | EXON53 | SLUCAS9 | − | AAGGAAGAAGCTGAGCAGGTC |
| 216 | EXON53 | SLUCAS9 | − | AAGGAAGAAGCTGAGCAGGTCT |
| 4234 | EXON53 | SLUCAS9 | − | GGAAGCTAAGGAAGAAGCTG |
| 4235 | EXON53 | SLUCAS9 | − | GGAAGCTAAGGAAGAAGCTGA |
| 217 | EXON53 | SLUCAS9 | − | GGAAGCTAAGGAAGAAGCTGAG |
| 4236 | EXON53 | SLUCAS9 | − | TTCAACACAATGGCTGGAAG |
| 4237 | EXON53 | SLUCAS9 | − | TTCAACACAATGGCTGGAAGC |
| 218 | EXON53 | SLUCAS9 | − | TTCAACACAATGGCTGGAAGCT |
| 4238 | EXON53 | SLUCAS9 | − | GTTAAAGGATTCAACACAAT |
| 4239 | EXON53 | SLUCAS9 | − | GTTAAAGGATTCAACACAATG |
| 219 | EXON53 | SLUCAS9 | − | GTTAAAGGATTCAACACAATGG |
| 4240 | EXON53 | SLUCAS9 | − | AAATGTTAAAGGATTCAACA |
| 4241 | EXON53 | SLUCAS9 | − | AAATGTTAAAGGATTCAACAC |
| 220 | EXON53 | SLUCAS9 | − | AAATGTTAAAGGATTCAACACA |
| 4242 | EXON53 | SLUCAS9 | − | GCAACAGTTGAATGAAATGT |
| 4243 | EXON53 | SLUCAS9 | − | GCAACAGTTGAATGAAATGTT |
| 221 | EXON53 | SLUCAS9 | − | GCAACAGTTGAATGAAATGTTA |
| 4244 | EXON53 | SLUCAS9 | − | TACAAGAACACCTTCAGAAC |
| 4245 | EXON53 | SLUCAS9 | − | TACAAGAACACCTTCAGAACC |
| 222 | EXON53 | SLUCAS9 | − | TACAAGAACACCTTCAGAACCG |
| 4246 | EXON53 | SLUCAS9 | − | AAGTACAAGAACACCTTCAG |
| 4247 | EXON53 | SLUCAS9 | − | AAGTACAAGAACACCTTCAGA |
| 223 | EXON53 | SLUCAS9 | − | AAGTACAAGAACACCTTCAGAA |
| 4248 | EXON53 | SLUCAS9 | − | AGTTGAAAGAATTCAGAATC |
| 4249 | EXON53 | SLUCAS9 | − | AGTTGAAAGAATTCAGAATCA |
| 224 | EXON53 | SLUCAS9 | − | AGTTGAAAGAATTCAGAATCAG |
| 4250 | EXON53 | SLUCAS9 | − | TAGTTGAAAGAATTCAGAAT |
| 4251 | EXON53 | SLUCAS9 | − | TAGTTGAAAGAATTCAGAATC |
| 225 | EXON53 | SLUCAS9 | − | TAGTTGAAAGAATTCAGAATCA |

TABLE 2
Additional DMD Guide Sequences (human-hg38.p12)

| | | | | Genomic | | | | | |
|---|---|---|---|---|---|---|---|---|---|
| | | | | coordinate | | SEQ | | | |
| | | | Genomic | chrX stop | | ID | | | |
| | | | coor- | (includes | | NO | | | |
| | | | dinate | PAM | | Guide | | | Off |
| | | | chrX_ | coor- | | se- | | | targets_ |
| EXON | CAS9 | ID | start | dinates) | Strand | quence | Guide sequence | PAM | grouped |
| 45 | SACAS9 | E45SaCas | 31968359 | 31968387 | + | 1000 | TGTTTGCAGACCTCCTGCCACC | GCAGAT | 20 |
| | KKH | 9KKH1 | | | | | | | |
| 45 | SACAS9 | E45SaCas | 31968373 | 31968401 | + | 1001 | CTGCCACCGCAGATTCAGGCTT | CCCAAT | 9 |
| | KKH | 9KKH2 | | | | | | | |
| 45 | SACAS9 | E45SaCas | 31968387 | 31968415 | + | 9 | TCAGGCTTCCCAATTTTTCCTG | TAGAAT | 37 |
| | KKH | 9KKH3 | | | | | | | |
| 45 | SACAS9 | E45SaCas | 31968409 | 31968437 | + | 10 | TAGAATACTGGCATCTGTTTTT | GAGGAT | 63 |
| | KKH | 9KKH4 | | | | | | | |
| 45 | SACAS9 | E45SaCas | 31968417 | 31968445 | + | 11 | TGGCATCTGTTTTTGAGGATTG | CTGAAT | 35 |
| | KKH | 9KKH5 | | | | | | | |
| 45 | SACAS9 | E45SaCas | 31968432 | 31968460 | + | 1002 | AGGATTGCTGAATTATTTCTTC | CCCAGT | 42 |
| | KKH | 9KKH6 | | | | | | | |
| 45 | SACAS9 | E45SaCas | 31968442 | 31968470 | + | 1003 | AATTATTTCTTCCCCAGTTGCA | TTCAAT | 68 |
| | KKH | 9KKH7 | | | | | | | |
| 45 | SACAS9 | E45SaCas | 31968456 | 31968484 | + | 1004 | CAGTTGCATTCAATGTTCTGAC | AACAGT | 17 |
| | KKH | 9KKH8 | | | | | | | |
| 45 | SACAS9 | E45SaCas | 31968471 | 31968499 | + | 1005 | TTCTGACAACAGTTTGCCGCTG | CCCAAT | 6 |
| | KKH | 9KKH9 | | | | | | | |
| 45 | SACAS9 | E45SaCas | 31968484 | 31968512 | + | 12 | TTGCCGCTGCCCAATGCCATCC | TGGAGT | 5 |
| | KKH | 9KKH10 | | | | | | | |
| 45 | SACAS9 | E45SaCas | 31968495 | 31968523 | + | 1006 | CAATGCCATCCTGGAGTTCCTG | TAAGAT | 27 |
| | KKH | 9KKH11 | | | | | | | |
| 45 | SACAS9 | E45SaCas | 31968517 | 31968545 | + | 1007 | TAAGATACCAAAAAGGCAAAAC | AAAAAT | 96 |
| | KKH | 9KKH12 | | | | | | | |
| 45 | SACAS9 | E45SaCas | 31968313 | 31968341 | − | 13 | GAGGTAGGGCGACAGATCTAAT | AGGAAT | 10 |
| | KKH | 9KKH13 | | | | | | | |
| 45 | SACAS9 | E45SaCas | 31968319 | 31968347 | − | 1008 | AAAAAAGAGGTAGGGCGACAGA | TCTAAT | 75 |
| | KKH | 9KKH14 | | | | | | | |
| 45 | SACAS9 | E45SaCas | 31968324 | 31968352 | − | 1009 | GACAGAAAAAAGAGGTAGGGCG | ACAGAT | 51 |
| | KKH | 9KKH15 | | | | | | | |
| 45 | SACAS9 | E45SaCas | 31968336 | 31968364 | − | 1010 | AAACAGCTGTCAGACAGAAAAA | AGAGGT | 123 |
| | KKH | 9KKH16 | | | | | | | |
| 45 | SACAS9 | E45SaCas | 31968368 | 31968396 | − | 1011 | GAAGCCTGAATCTGCGGTGGCA | GGAGGT | 19 |
| | KKH | 9KKH17 | | | | | | | |
| 45 | SACAS9 | E45SaCas | 31968378 | 31968406 | − | 1012 | GAAAAATTGGGAAGCCTGAATC | TGCGGT | 29 |
| | KKH | 9KKH18 | | | | | | | |
| 45 | SACAS9 | E45SaCas | 31968385 | 31968413 | − | 14 | TCTACAGGAAAAATTGGGAAGC | CTGAAT | 64 |
| | KKH | 9KKH19 | | | | | | | |
| 45 | SACAS9 | E45SaCas | 31968399 | 31968427 | − | 1013 | ACAGATGCCAGTATTCTACAGG | AAAAAT | 22 |
| | KKH | 9KKH20 | | | | | | | |
| 45 | SACAS9 | E45SaCas | 31968415 | 31968443 | − | 1014 | TCAGCAATCCTCAAAAACAGAT | GCCAGT | 50 |
| | KKH | 9KKH21 | | | | | | | |
| 45 | SACAS9 | E45SaCas | 31968421 | 31968449 | − | 1015 | AATAATTCAGCAATCCTCAAAA | ACAGAT | 99 |
| | KKH | 9KKH22 | | | | | | | |
| 45 | SACAS9 | E45SaCas | 31968435 | 31968463 | − | 1016 | GCAACTGGGGAAGAAATAATTC | AGCAAT | 43 |
| | KKH | 9KKH23 | | | | | | | |
| 45 | SACAS9 | E45SaCas | 31968443 | 31968471 | − | 1017 | CATTGAATGCAACTGGGGAAGA | AATAAT | 54 |
| | KKH | 9KKH24 | | | | | | | |
| 45 | SACAS9 | E45SaCas | 31968446 | 31968474 | − | 1018 | GAACATTGAATGCAACTGGGGA | AGAAAT | 23 |
| | KKH | 9KKH25 | | | | | | | |
| 45 | SACAS9 | E45SaCas | 31968463 | 31968491 | − | 15 | GCGGCAAACTGTTGTCAGAACA | TTGAAT | 5 |
| | KKH | 9KKH26 | | | | | | | |
| 45 | SACAS9 | E45SaCas | 31968502 | 31968530 | − | 16 | TTTTGGTATCTTACAGGAACTC | CAGGAT | 52 |
| | KKH | 9KKH27 | | | | | | | |
| 45 | SLUCAS | E45SLCas | 31968332 | 31968358 | + | 2000 | CCCTACCTCTTTTTTCTGTCTG | ACAG | 23 |
| | 9KH | 9KH1 | | | | | | | |
| 45 | SLUCAS | E45SLCas | 31968342 | 31968368 | + | 2001 | TTTTTCTGTCTGACAGCTGTTT | GCAG | 22 |
| | 9KH | 9KH2 | | | | | | | |
| 45 | SLUCAS | E45SLCas | 31968359 | 31968385 | + | 2002 | TGTTTGCAGACCTCCTGCCACC | GCAG | 9 |
| | 9KH | 9KH3 | | | | | | | |
| 45 | SLUCAS | E45SLCas | 31968365 | 31968391 | + | 2003 | CAGACCTCCTGCCACCGCAGAT | TCAG | 9 |
| | 9KH | 9KH4 | | | | | | | |
| 45 | SLUCAS | E45SLCas | 31968366 | 31968392 | + | 128 | AGACCTCCTGCCACCGCAGATT | CAGG | 10 |
| | 9KH | 9KH5 | | | | | | | |
| 45 | SLUCAS | E45SLCas | 31968386 | 31968412 | + | 2004 | TTCAGGCTTCCCAATTTTTCCT | GTAG | 11 |
| | 9KH | 9KH6 | | | | | | | |
| 45 | SLUCAS | E45SLCas | 31968394 | 31968420 | + | 129 | TCCCAATTTTTCCTGTAGAATA | CTGG | 19 |
| | 9KH | 9KH7 | | | | | | | |
| 45 | SLUCAS | E45SLCas | 31968408 | 31968434 | + | 2005 | GTAGAATACTGGCATCTGTTTT | TGAG | 16 |
| | 9KH | 9KH8 | | | | | | | |
| 45 | SLUCAS | E45SLCas | 31968409 | 31968435 | + | 130 | TAGAATACTGGCATCTGTTTTT | GAGG | 19 |
| | 9KH | 9KH9 | | | | | | | |
| 45 | SLUCAS | E45SLCas | 31968433 | 31968459 | + | 2006 | GGATTGCTGAATTATTTCTTCC | CCAG | 18 |
| | 9KH | 9KH10 | | | | | | | |
| 45 | SLUCAS | E45SLCas | 31968457 | 31968483 | + | 2007 | AGTTGCATTCAATGTTCTGACA | ACAG | 10 |
| | 9KH | 9KH11 | | | | | | | |
| 45 | SLUCAS | E45SLCas | 31968483 | 31968509 | + | 131 | TTTGCCGCTGCCCAATGCCATC | CTGG | 2 |
| | 9KH | 9KH12 | | | | | | | |
| 45 | SLUCAS | E45SLCas | 31968485 | 31968511 | + | 2008 | TGCCGCTGCCCAATGCCATCCT | GGAG | 7 |
| | 9KH | 9KH13 | | | | | | | |
| 45 | SLUCAS | E45SLCas | 31968495 | 31968521 | + | 2009 | CAATGCCATCCTGGAGTTCCTG | TAAG | 14 |
| | 9KH | 9KH14 | | | | | | | |
| 45 | SLUCAS | E45SLCas | 31968506 | 31968532 | + | 2010 | TGGAGTTCCTGTAAGATACCAA | AAAG | 10 |
| | 9KH | 9KH15 | | | | | | | |
| 45 | SLUCAS | E45SLCas | 31968507 | 31968533 | + | 132 | GGAGTTCCTGTAAGATACCAAA | AAGG | 9 |
| | 9KH | 9KH16 | | | | | | | |
| 45 | SLUCAS | E45SLCas | 31968316 | 31968342 | − | 133 | AGAGGTAGGGCGACAGATCTAA | TAGG | 6 |
| | 9KH | 9KH17 | | | | | | | |
| 45 | SLUCAS | E45SLCas | 31968317 | 31968343 | − | 2011 | AAGAGGTAGGGCGACAGATCTA | ATAG | 5 |
| | 9KH | 9KH18 | | | | | | | |
| 45 | SLUCAS | E45SLCas | 31968326 | 31968352 | − | 2012 | GACAGAAAAAAGAGGTAGGGCG | ACAG | 31 |
| | 9KH | 9KH19 | | | | | | | |
| 45 | SLUCAS | E45SLCas | 31968332 | 31968358 | − | 134 | CTGTCAGACAGAAAAAAGAGGT | AGGG | 28 |
| | 9KH | 9KH20 | | | | | | | |
| 45 | SLUCAS | E45SLCas | 31968333 | 31968359 | − | 135 | GCTGTCAGACAGAAAAAAGAGG | TAGG | 43 |
| | 9KH | 9KH21 | | | | | | | |
| 45 | SLUCAS | E45SLCas | 31968334 | 31968360 | − | 2013 | AGCTGTCAGACAGAAAAAAGAG | GTAG | 67 |
| | 9KH | 9KH22 | | | | | | | |
| 45 | SLUCAS | E45SLCas | 31968337 | 31968363 | − | 136 | AACAGCTGTCAGACAGAAAAAA | GAGG | 55 |
| | 9KH | 9KH23 | | | | | | | |
| 45 | SLUCAS | E45SLCas | 31968338 | 31968364 | − | 2014 | AAACAGCTGTCAGACAGAAAAA | AGAG | 37 |
| | 9KH | 9KH24 | | | | | | | |
| 45 | SLUCAS | E45SLCas | 31968340 | 31968366 | − | 2015 | GCAAACAGCTGTCAGACAGAAA | AAAG | 27 |
| | 9KH | 9KH25 | | | | | | | |
| 45 | SLUCAS | E45SLCas | 31968347 | 31968373 | − | 2016 | GAGGTCTGCAAACAGCTGTCAG | ACAG | 23 |
| | 9KH | 9KH26 | | | | | | | |
| 45 | SLUCAS | E45SLCas | 31968351 | 31968377 | − | 2017 | GCAGGAGGTCTGCAAACAGCTG | TCAG | 16 |
| | 9KH | 9KH27 | | | | | | | |
| 45 | SLUCAS | E45SLCas | 31968358 | 31968384 | − | 2018 | TGCGGTGGCAGGAGGTCTGCAA | ACAG | 14 |
| | 9KH | 9KH28 | | | | | | | |
| 45 | SLUCAS | E45SLCas | 31968369 | 31968395 | − | 137 | AAGCCTGAATCTGCGGTGGCAG | GAGG | 11 |
| | 9KH | 9KH29 | | | | | | | |
| 45 | SLUCAS | E45SLCas | 31968370 | 31968396 | − | 2019 | GAAGCCTGAATCTGCGGTGGCA | GGAG | 15 |
| | 9KH | 9KH30 | | | | | | | |
| 45 | SLUCAS | E45SLCas | 31968372 | 31968398 | − | 138 | GGGAAGCCTGAATCTGCGGTGG | CAGG | 8 |
| | 9KH | 9KH31 | | | | | | | |
| 45 | SLUCAS | E45SLCas | 31968373 | 31968399 | − | 2020 | TGGGAAGCCTGAATCTGCGGTG | GCAG | 6 |
| | 9KH | 9KH32 | | | | | | | |
| 45 | SLUCAS | E45SLCas | 31968376 | 31968402 | − | 139 | AATTGGGAAGCCTGAATCTGCG | GTGG | 7 |
| | 9KH | 9KH33 | | | | | | | |
| 45 | SLUCAS | E45SLCas | 31968379 | 31968405 | − | 140 | AAAAATTGGGAAGCCTGAATCT | GCGG | 26 |
| | 9KH | 9KH34 | | | | | | | |
| 45 | SLUCAS | E45SLCas | 31968392 | 31968418 | − | 2021 | AGTATTCTACAGGAAAAATTGG | GAAG | 28 |
| | 9KH | 9KH35 | | | | | | | |
| 45 | SLUCAS | E45SLCas | 31968395 | 31968421 | − | 141 | GCCAGTATTCTACAGGAAAAAT | TGGG | 16 |
| | 9KH | 9KH36 | | | | | | | |
| 45 | SLUCAS | E45SLCas | 31968396 | 31968422 | − | 142 | TGCCAGTATTCTACAGGAAAAA | TTGG | 17 |
| | 9KH | 9KH37 | | | | | | | |
| 45 | SLUCAS | E45SLCas | 31968405 | 31968431 | − | 143 | AAAAACAGATGCCAGTATTCTA | CAGG | 21 |
| | 9KH | 9KH38 | | | | | | | |
| 45 | SLUCAS | E45SLCas | 31968406 | 31968432 | − | 2022 | CAAAAACAGATGCCAGTATTCT | ACAG | 28 |
| | 9KH | 9KH39 | | | | | | | |
| 45 | SLUCAS | E45SLCas | 31968416 | 31968442 | − | 2023 | CAGCAATCCTCAAAAACAGATG | CCAG | 23 |
| | 9KH | 9KH40 | | | | | | | |
| 45 | SLUCAS | E45SLCas | 31968423 | 31968449 | − | 2024 | AATAATTCAGCAATCCTCAAAA | ACAG | 31 |
| | 9KH | 9KH41 | | | | | | | |
| 45 | SLUCAS | E45SLCas | 31968439 | 31968465 | − | 2025 | ATGCAACTGGGGAAGAAATAAT | TCAG | 33 |
| | 9KH | 9KH42 | | | | | | | |
| 45 | SLUCAS | E45SLCas | 31968450 | 31968476 | − | 2026 | CAGAACATTGAATGCAACTGGG | GAAG | 11 |
| | 9KH | 9KH43 | | | | | | | |
| 45 | SLUCAS | E45SLCas | 31968453 | 31968479 | − | 144 | TGTCAGAACATTGAATGCAACT | GGGG | 12 |
| | 9KH | 9KH44 | | | | | | | |
| 45 | SLUCAS | E45SLCas | 31968454 | 31968480 | − | 145 | TTGTCAGAACATTGAATGCAAC | TGGG | 30 |
| | 9KH | 9KH45 | | | | | | | |
| 45 | SLUCAS | E45SLCas | 31968455 | 31968481 | − | 146 | GTTGTCAGAACATTGAATGCAA | CTGG | 12 |
| | 9KH | 9KH46 | | | | | | | |
| 45 | SLUCAS | E45SLCas | 31968473 | 31968499 | − | 2027 | ATTGGGCAGCGGCAAACTGTTG | TCAG | 3 |
| | 9KH | 9KH47 | | | | | | | |
| 45 | SLUCAS | E45SLCas | 31968487 | 31968513 | − | 147 | AACTCCAGGATGGCATTGGGCA | GCGG | 9 |
| | 9KH | 9KH48 | | | | | | | |
| 45 | SLUCAS | E45SLCas | 31968490 | 31968516 | − | 2028 | AGGAACTCCAGGATGGCATTGG | GCAG | 16 |
| | 9KH | 9KH49 | | | | | | | |
| 45 | SLUCAS | E45SLCas | 31968493 | 31968519 | − | 148 | TACAGGAACTCCAGGATGGCAT | TGGG | 10 |
| | 9KH | 9KH50 | | | | | | | |
| 45 | SLUCAS | E45SLCas | 31968494 | 31968520 | − | 149 | TTACAGGAACTCCAGGATGGCA | TTGG | 13 |
| | 9KH | 9KH51 | | | | | | | |
| 45 | SLUCAS | E45SLCas | 31968500 | 31968526 | − | 150 | GGTATCTTACAGGAACTCCAGG | ATGG | 7 |
| | 9KH | 9KH52 | | | | | | | |
| 45 | SLUCAS | E45SLCas | 31968504 | 31968530 | − | 151 | TTTTGGTATCTTACAGGAACTC | CAGG | 35 |
| | 9KH | 9KH53 | | | | | | | |
| 45 | SLUCAS | E45SLCas | 31968505 | 31968531 | − | 2029 | TTTTTGGTATCTTACAGGAACT | CCAG | 21 |
| | 9KH | 9KH54 | | | | | | | |
| 45 | SLUCAS | E45SLCas | 31968513 | 31968539 | − | 152 | GTTTTGCCTTTTTGGTATCTTA | CAGG | 32 |
| | 9KH | 9KH55 | | | | | | | |
| 45 | SLUCAS | E45SLCas | 31968514 | 31968540 | − | 2030 | TGTTTTGCCTTTTTGGTATCTT | ACAG | 58 |
| | 9KH | 9KH56 | | | | | | | |
| 51 | SACAS9 | E51SaCas | 31773943 | 31773971 | + | 1019 | TCATTTTTTCTCATACCTTCTG | CTTGAT | 91 |
| | KKH | 9KKH1 | | | | | | | |
| 51 | SACAS9 | E51SaCas | 31773946 | 31773974 | + | 1020 | TTTTTTCTCATACCTTCTGCTT | GATGAT | 132 |
| | KKH | 9KKH2 | | | | | | | |
| 51 | SACAS9 | E51SaCas | 31773958 | 31773986 | + | 1021 | CCTTCTGCTTGATGATCATCTC | GTTGAT | 23 |
| | KKH | 9KKH3 | | | | | | | |
| 51 | SACAS9 | E51SaCas | 31773969 | 31773997 | + | 1022 | ATGATCATCTCGTTGATATCCT | CAAGGT | 15 |
| | KKH | 9KKH4 | | | | | | | |
| 51 | SACAS9 | E51SaCas | 31773992 | 31774020 | + | 1023 | AAGGTCACCCACCATCACCCTC | TGTGAT | 33 |
| | KKH | 9KKH5 | | | | | | | |
| 51 | SACAS9 | E51SaCas | 31774005 | 31774033 | + | 1024 | ATCACCCTCTGTGATTTTATAA | CTTGAT | 45 |
| | KKH | 9KKH6 | | | | | | | |
| 51 | SACAS9 | E51SaCas | 31774023 | 31774051 | + | 1025 | ATAACTTGATCAAGCAGAGAAA | GCCAGT | 101 |
| | KKH | 9KKH7 | | | | | | | |
| 51 | SACAS9 | E51SaCas | 31774027 | 31774055 | + | 1026 | CTTGATCAAGCAGAGAAAGCCA | GTCGGT | 55 |
| | KKH | 9KKH8 | | | | | | | |
| 51 | SACAS9 | E51SaCas | 31774031 | 31774059 | + | 1027 | ATCAAGCAGAGAAAGCCAGTCG | GTAAGT | 16 |
| | KKH | 9KKH9 | | | | | | | |
| 51 | SACAS9 | E51SaCas | 31774047 | 31774075 | + | 1028 | CAGTCGGTAAGTTCTGTCCAAG | CCCGGT | 7 |
| | KKH | 9KKH10 | | | | | | | |
| 51 | SACAS9 | E51SaCas | 31774053 | 31774081 | 1 | 1029 | GTAAGTTCTGTCCAAGCCCGGT | TGAAAT | 4 |
| | KKH | 9KKH11 | | | | | | | |
| 51 | SACAS9 | E51SaCas | 31774067 | 31774095 | + | 1030 | AGCCCGGTTGAAATCTGCCAGA | GCAGGT | 7 |
| | KKH | 9KKH12 | | | | | | | |
| 51 | SACAS9 | E51SaCas | 31774088 | 31774116 | + | 1031 | AGCAGGTACCTCCAACATCAAG | GAAGAT | 23 |
| | KKH | 9KKH13 | | | | | | | |
| 51 | SACAS9 | E51SaCas | 31774100 | 31774128 | + | 1032 | CAACATCAAGGAAGATGGCATT | TCTAGT | 54 |
| | KKH | 9KKH14 | | | | | | | |
| 51 | SACAS9 | E51SaCas | 31774108 | 31774136 | + | 1033 | AGGAAGATGGCATTTCTAGTTT | GGAGAT | 62 |
| | KKH | 9KKH15 | | | | | | | |
| 51 | SACAS9 | E51SaCas | 31774114 | 31774142 | + | 1034 | ATGGCATTTCTAGTTTGGAGAT | GGCAGT | 56 |
| | KKH | 9KKH16 | | | | | | | |
| 51 | SACAS9 | E51SaCas | 31774123 | 31774151 | + | 1035 | CTAGTTTGGAGATGGCAGTTTC | CTTAGT | 32 |
| | KKH | 9KKH17 | | | | | | | |
| 51 | SACAS9 | E51SaCas | 31774133 | 31774161 | + | 1036 | GATGGCAGTTTCCTTAGTAACC | ACAGGT | 24 |
| | KKH | 9KKH18 | | | | | | | |
| 51 | SACAS9 | E51SaCas | 31774147 | 31774175 | + | 19 | TAGTAACCACAGGTTGTGTCAC | CAGAGT | 18 |
| | KKH | 9KKH19 | | | | | | | |
| 51 | SACAS9 | E51SaCas | 31774153 | 31774181 | + | 1037 | CCACAGGTTGTGTCACCAGAGT | AACAGT | 20 |
| | KKH | 9KKH20 | | | | | | | |
| 51 | SACAS9 | E51SaCas | 31774159 | 31774187 | + | 20 | GTTGTGTCACCAGAGTAACAGT | CTGAGT | 21 |
| | KKH | 9KKH21 | | | | | | | |
| 51 | SACAS9 | E51SaCas | 31774171 | 31774199 | + | 1038 | GAGTAACAGTCTGAGTAGGAGC | TAAAAT | 18 |
| | KKH | 9KKH22 | | | | | | | |
| 51 | SACAS9 | E51SaCas | 31774180 | 31774208 | + | 21 | TCTGAGTAGGAGCTAAAATATT | TTGGGT | 38 |
| | KKH | 9KKH23 | | | | | | | |
| 51 | SACAS9 | E51SaCas | 31773936 | 31773964 | − | 1039 | AGAAGGTATGAGAAAAAATGAT | AAAAGT | 236 |
| | KKH | 9KKH24 | | | | | | | |
| 51 | SACAS9 | E51SaCas | 31773942 | 31773970 | − | 1040 | TCAAGCAGAAGGTATGAGAAAA | AATGAT | 99 |
| | KKH | 9KKH25 | | | | | | | |
| 51 | SACAS9 | E51SaCas | 31773945 | 31773973 | − | 1041 | TCATCAAGCAGAAGGTATGAGA | AAAAAT | 43 |
| | KKH | 9KKH26 | | | | | | | |
| 51 | SACAS9 | E51SaCas | 31773957 | 31773985 | − | 1042 | TCAACGAGATGATCATCAAGCA | GAAGGT | 10 |
| | KKH | 9KKH27 | | | | | | | |
| 51 | SACAS9 | E51SaCas | 31773972 | 31774000 | − | 1043 | GTGACCTTGAGGATATCAACGA | GATGAT | 7 |
| | KKH | 9KKH28 | | | | | | | |
| 51 | SACAS9 | E51SaCas | 31773975 | 31774003 | − | 1044 | TGGGTGACCTTGAGGATATCAA | CGAGAT | 68 |
| | KKH | 9KKH29 | | | | | | | |
| 51 | SACAS9 | E51SaCas | 31773986 | 31774014 | − | 22 | GAGGGTGATGGTGGGTGACCTT | GAGGAT | 46 |
| | KKH | 9KKH30 | | | | | | | |
| 51 | SACAS9 | E51SaCas | 31773998 | 31774026 | − | 23 | TATAAAATCACAGAGGGTGATG | GTGGGT | 42 |
| | KKH | 9KKH31 | | | | | | | |
| 51 | SACAS9 | E51SaCas | 31774002 | 31774030 | − | 1045 | AAGTTATAAAATCACAGAGGGT | GATGGT | 77 |
| | KKH | 9KKH32 | | | | | | | |
| 51 | SACAS9 | E51SaCas | 31774005 | 31774033 | | 1046 | ATCAAGTTATAAAATCACAGAG | GGTGAT | 90 |
| | KKH | 9KKH33 | | | | | | | |
| 51 | SACAS9 | E51SaCas | 31774008 | 31774036 | − | 24 | TTGATCAAGTTATAAAATCACA | GAGGGT | 86 |
| | KKH | 9KKH34 | | | | | | | |
| 51 | SACAS9 | E51SaCas | 31774018 | 31774046 | − | 1047 | CTTTCTCTGCTTGATCAAGTTA | TAAAAT | 45 |
| | KKH | 9KKH35 | | | | | | | |
| 51 | SACAS9 | E51SaCas | 31774026 | 31774054 | − | 1048 | CCGACTGGCTTTCTCTGCTTGA | TCAAGT | 18 |
| | KKH | 9KKH36 | | | | | | | |
| 51 | SACAS9 | E51SaCas | 31774031 | 31774059 | − | 1049 | ACTTACCGACTGGCTTTCTCTG | CTTGAT | 11 |
| | KKH | 9KKH37 | | | | | | | |
| 51 | SACAS9 | E51SaCas | 31774079 | 31774107 | − | 1050 | GATGTTGGAGGTACCTGCTCTG | GCAGAT | 22 |
| | KKH | 9KKH38 | | | | | | | |
| 51 | SACAS9 | E51SaCas | 31774095 | 31774123 | − | 1051 | AAATGCCATCTTCCTTGATGTT | GGAGGT | 57 |
| | KKH | 9KKH39 | | | | | | | |
| 51 | SACAS9 | E51SaCas | 31774104 | 31774132 | − | 1052 | CCAAACTAGAAATGCCATCTTC | CTTGAT | 46 |
| | KKH | 9KKH40 | | | | | | | |
| 51 | SACAS9 | E51SaCas | 31774119 | 31774147 | − | 1053 | AGGAAACTGCCATCTCCAAACT | AGAAAT | 63 |
| | KKH | 9KKH41 | | | | | | | |
| 51 | SACAS9 | E51SaCas | 31774152 | 31774180 | − | 1054 | CTGTTACTCTGGTGACACAACC | TGTGGT | 27 |
| | KKH | 9KKH42 | | | | | | | |
| 51 | SACAS9 | E51SaCas | 31774167 | 31774195 | − | 1055 | TAGCTCCTACTCAGACTGTTAC | TCTGGT | 13 |
| | KKH | 9KKH43 | | | | | | | |
| 51 | SLUCAS | E51SLCas | 31773969 | 31773995 | + | 2031 | ATGATCATCTCGTTGATATCCT | CAAG | 6 |
| | 9KH | 9KH1 | | | | | | | |
| 51 | SLUCAS | E51SLCas | 31773970 | 31773996 | + | 170 | TGATCATCTCGTTGATATCCTC | AAGG | 6 |
| | 9KH | 9KH2 | | | | | | | |
| 51 | SLUCAS | E51SLCas | 31774011 | 31774037 | + | 2032 | CTCTGTGATTTTATAACTTGAT | CAAG | 18 |
| | 9KH | 9KH3 | | | | | | | |
| 51 | SLUCAS | E51SLCas | 31774014 | 31774040 | + | 2033 | TGTGATTTTATAACTTGATCAA | GCAG | 29 |
| | 9KH | 9KH4 | | | | | | | |
| 51 | SLUCAS | E51SLCas | 31774016 | 31774042 | + | 2034 | TGATTTTATAACTTGATCAAGC | AGAG | 15 |
| | 9KH | 9KH5 | | | | | | | |
| 51 | SLUCAS | E51SLCas | 31774020 | 31774046 | + | 2035 | TTTATAACTTGATCAAGCAGAG | AAAG | 7 |
| | 9KH | 9KH6 | | | | | | | |
| 51 | SLUCAS | E51SLCas | 31774024 | 31774050 | + | 2036 | TAACTTGATCAAGCAGAGAAAG | CCAG | 24 |
| | 9KH | 9KH7 | | | | | | | |
| 51 | SLUCAS | E51SLCas | 31774028 | 31774054 | + | 171 | TTGATCAAGCAGAGAAAGCCAG | TCGG | 23 |
| | 9KH | 9KH8 | | | | | | | |
| 51 | SLUCAS | E51SLCas | 31774032 | 31774058 | + | 2037 | TCAAGCAGAGAAAGCCAGTCGG | TAAG | 7 |
| | 9KH | 9KH9 | | | | | | | |
| 51 | SLUCAS | E51SLCas | 31774043 | 31774069 | + | 2038 | AAGCCAGTCGGTAAGTTCTGTC | CAAG | 7 |
| | 9KH | 9KH10 | | | | | | | |
| 51 | SLUCAS | E51SLCas | 31774048 | 31774074 | + | 172 | AGTCGGTAAGTTCTGTCCAAGC | CCGG | 2 |
| | 9KH | 9KH11 | | | | | | | |
| 51 | SLUCAS | E51SLCas | 31774062 | 31774088 | + | 2039 | GTCCAAGCCCGGTTGAAATCTG | CCAG | 1 |
| | 9KH | 9KH12 | | | | | | | |
| 51 | SLUCAS | E51SLCas | 31774064 | 31774090 | + | 2040 | CCAAGCCCGGTTGAAATCTGCC | AGAG | 2 |
| | 9KH | 9KH13 | | | | | | | |
| 51 | SLUCAS | E51SLCas | 31774067 | 31774093 | + | 2041 | AGCCCGGTTGAAATCTGCCAGA | GCAG | 4 |
| | 9KH | 9KH14 | | | | | | | |
| 51 | SLUCAS | E51SLCas | 31774068 | 31774094 | + | 173 | GCCCGGTTGAAATCTGCCAGAG | CAGG | 5 |
| | 9KH | 9KH15 | | | | | | | |
| 51 | SLUCAS | E51SLCas | 31774084 | 31774110 | + | 2042 | CCAGAGCAGGTACCTCCAACAT | CAAG | 14 |
| | 9KH | 9KH16 | | | | | | | |
| 51 | SLUCAS | E51SLCas | 31774085 | 31774111 | + | 174 | CAGAGCAGGTACCTCCAACATC | AAGG | 13 |
| | 9KH | 9KH17 | | | | | | | |
| 51 | SLUCAS | E51SLCas | 31774088 | 31774114 | + | 2043 | AGCAGGTACCTCCAACATCAAG | GAAG | 12 |
| | 9KH | 9KH18 | | | | | | | |
| 51 | SLUCAS | E51SLCas | 31774092 | 31774118 | + | 175 | GGTACCTCCAACATCAAGGAAG | ATGG | 6 |
| | 9KH | 9KH19 | | | | | | | |
| 51 | SLUCAS | E51SLCas | 31774101 | 31774127 | + | 2044 | AACATCAAGGAAGATGGCATTT | CTAG | 32 |
| | 9KH | 9KH20 | | | | | | | |
| 51 | SLUCAS | E51SLCas | 31774106 | 31774132 | + | 176 | CAAGGAAGATGGCATTTCTAGT | TTGG | 21 |
| | 9KH | 9KH21 | | | | | | | |
| 51 | SLUCAS | E51SLCas | 31774108 | 31774134 | + | 2045 | AGGAAGATGGCATTTCTAGTTT | GGAG | 50 |
| | 9KH | 9KH22 | | | | | | | |
| 51 | SLUCAS | E51SLCas | 31774112 | 31774138 | + | 177 | AGATGGCATTTCTAGTTTGGAG | ATGG | 10 |
| | 9KH | 9KH23 | | | | | | | |
| 51 | SLUCAS | E51SLCas | 31774115 | 31774141 | + | 2046 | TGGCATTTCTAGTTTGGAGATG | GCAG | 22 |
| | 9KH | 9KH24 | | | | | | | |
| 51 | SLUCAS | E51SLCas | 31774124 | 31774150 | + | 2047 | TAGTTTGGAGATGGCAGTTTCC | TTAG | 20 |
| | 9KH | 9KH25 | | | | | | | |
| 51 | SLUCAS | E51SLCas | 31774133 | 31774159 | + | 2048 | GATGGCAGTTTCCTTAGTAACC | ACAG | 11 |
| | 9KH | 9KH26 | | | | | | | |
| 51 | SLUCAS | E51SLCas | 31774134 | 31774160 | + | 178 | ATGGCAGTTTCCTTAGTAACCA | CAGG | 14 |
| | 9KH | 9KH27 | | | | | | | |
| 51 | SLUCAS | E51SLCas | 31774146 | 31774172 | + | 2049 | TTAGTAACCACAGGTTGTGTCA | CCAG | 7 |
| | 9KH | 9KH28 | | | | | | | |
| 51 | SLUCAS | E51SLCas | 31774148 | 31774174 | + | 2050 | AGTAACCACAGGTTGTGTCACC | AGAG | 7 |
| | 9KH | 9KH29 | | | | | | | |
| 51 | SLUCAS | E51SLCas | 31774154 | 31774180 | + | 2051 | CACAGGTTGTGTCACCAGAGTA | ACAG | 14 |
| | 9KH | 9KH30 | | | | | | | |
| 51 | SLUCAS | E51SLCas | 31774160 | 31774186 | + | 2052 | TTGTGTCACCAGAGTAACAGTC | TGAG | 9 |
| | 9KH | 9KH31 | | | | | | | |
| 51 | SLUCAS | E51SLCas | 31774163 | 31774189 | + | 2053 | TGTCACCAGAGTAACAGTCTGA | GTAG | 9 |
| | 9KH | 9KH32 | | | | | | | |
| 51 | SLUCAS | E51SLCas | 31774164 | 31774190 | + | 179 | GTCACCAGAGTAACAGTCTGAG | TAGG | 14 |
| | 9KH | 9KH33 | | | | | | | |
| 51 | SLUCAS | E51SLCas | 31774166 | 31774192 | + | 2054 | CACCAGAGTAACAGTCTGAGTA | GGAG | 11 |
| | 9KH | 9KH34 | | | | | | | |
| 51 | SLUCAS | E51SLCas | 31774180 | 31774206 | + | 180 | TCTGAGTAGGAGCTAAAATATT | TTGG | 11 |
| | 9KH | 9KH35 | | | | | | | |
| 51 | SLUCAS | E51SLCas | 31774181 | 31774207 | + | 181 | CTGAGTAGGAGCTAAAATATTT | TGGG | 21 |
| | 9KH | 9KH36 | | | | | | | |
| 51 | SLUCAS | E51SLCas | 31774194 | 31774220 | + | 2055 | AAAATATTTTGGGTTTTTGCAA | AAAG | 56 |
| | 9KH | 9KH37 | | | | | | | |
| 51 | SLUCAS | E51SLCas | 31774195 | 31774221 | + | 182 | AAATATTTTGGGTTTTTGCAAA | AAGG | 61 |
| | 9KH | 9KH38 | | | | | | | |
| 51 | SLUCAS | E51SLCas | 31773927 | 31773953 | − | 2056 | GAAAAAATGATAAAAGTTGGCA | GAAG | 77 |
| | 9KH | 9KH39 | | | | | | | |
| 51 | SLUCAS | E51SLCas | 31773930 | 31773956 | − | 2057 | TGAGAAAAAATGATAAAAGTTG | GCAG | 124 |
| | 9KH | 9KH40 | | | | | | | |
| 51 | SLUCAS | E51SLCas | 31773933 | 31773959 | − | 183 | GTATGAGAAAAAATGATAAAAG | TTGG | 99 |
| | 9KH | 9KH41 | | | | | | | |
| 51 | SLUCAS | E51SLCas | 31773937 | 31773963 | − | 2058 | GAAGGTATGAGAAAAAATGATA | AAAG | 64 |
| | 9KH | 9KH42 | | | | | | | |
| 51 | SLUCAS | E51SLCas | 31773952 | 31773978 | − | 2059 | GATGATCATCAAGCAGAAGGTA | TGAG | 11 |
| | 9KH | 9KH43 | | | | | | | |
| 51 | SLUCAS | E51SLCas | 31773958 | 31773984 | − | 184 | CAACGAGATGATCATCAAGCAG | AAGG | 7 |
| | 9KH | 9KH44 | | | | | | | |
| 51 | SLUCAS | E51SLCas | 31773959 | 31773985 | − | 2060 | TCAACGAGATGATCATCAAGCA | GAAG | 3 |
| | 9KH | 9KH45 | | | | | | | |
| 51 | SLUCAS | E51SLCas | 31773962 | 31773988 | − | 2061 | ATATCAACGAGATGATCATCAA | GCAG | 7 |
| | 9KH | 9KH46 | | | | | | | |
| 51 | SLUCAS | E51SLCas | 31773965 | 31773991 | − | 2062 | AGGATATCAACGAGATGATCAT | CAAG | 7 |
| | 9KH | 9KH47 | | | | | | | |
| 51 | SLUCAS | E51SLCas | 31773977 | 31774003 | − | 2063 | TGGGTGACCTTGAGGATATCAA | CGAG | 17 |
| | 9KH | 9KH48 | | | | | | | |
| 51 | SLUCAS | E51SLCas | 31773988 | 31774014 | − | 185 | GAGGGTGATGGTGGGTGACCTT | GAGG | 22 |
| | 9KH | 9KH49 | | | | | | | |
| 51 | SLUCAS | E51SLCas | 31773989 | 31774015 | − | 2064 | AGAGGGTGATGGTGGGTGACCT | TGAG | 48 |
| | 9KH | 9KH50 | | | | | | | |
| 51 | SLUCAS | E51SLCas | 31773999 | 31774025 | − | 186 | ATAAAATCACAGAGGGTGATGG | TGGG | 27 |
| | 9KH | 9KH51 | | | | | | | |
| 51 | SLUCAS | E51SLCas | 31774000 | 31774026 | − | 187 | TATAAAATCACAGAGGGTGATG | GTGG | 23 |
| | 9KH | 9KH52 | | | | | | | |
| 51 | SLUCAS | E51SLCas | 31774003 | 31774029 | − | 188 | AGTTATAAAATCACAGAGGGTG | ATGG | 20 |
| | 9KH | 9KH53 | | | | | | | |
| 51 | SLUCAS | E51SLCas | 31774009 | 31774035 | − | 189 | TGATCAAGTTATAAAATCACAG | AGGG | 29 |
| | 9KH | 9KH54 | | | | | | | |
| 51 | SLUCAS | E51SLCas | 31774010 | 31774036 | − | 190 | TTGATCAAGTTATAAAATCACA | GAGG | 30 |
| | 9KH | 9KH55 | | | | | | | |
| 51 | SLUCAS | E51SLCas | 31774011 | 31774037 | − | 2065 | CTTGATCAAGTTATAAAATCAC | AGAG | 14 |
| | 9KH | 9KH56 | | | | | | | |
| 51 | SLUCAS | E51SLCas | 31774013 | 31774039 | − | 2066 | TGCTTGATCAAGTTATAAAATC | ACAG | 11 |
| | 9KH | 9KH57 | | | | | | | |
| 51 | SLUCAS | E51SLCas | 31774027 | 31774053 | − | 2067 | CGACTGGCTTTCTCTGCTTGAT | CAAG | 8 |
| | 9KH | 9KH58 | | | | | | | |
| 51 | SLUCAS | E51SLCas | 31774046 | 31774072 | − | 191 | GGGCTTGGACAGAACTTACCGA | CTGG | 2 |
| | 9KH | 9KH59 | | | | | | | |
| 51 | SLUCAS | E51SLCas | 31774060 | 31774086 | − | 2068 | GGCAGATTTCAACCGGGCTTGG | ACAG | 5 |
| | 9KH | 9KH60 | | | | | | | |
| 51 | SLUCAS | E51SLCas | 31774064 | 31774090 | − | 192 | CTCTGGCAGATTTCAACCGGGC | TTGG | 1 |
| | 9KH | 9KH61 | | | | | | | |
| 51 | SLUCAS | E51SLCas | 31774069 | 31774095 | − | 193 | ACCTGCTCTGGCAGATTTCAAC | CGGG | 10 |
| | 9KH | 9KH62 | | | | | | | |
| 51 | SLUCAS | E51SLCas | 31774070 | 31774096 | − | 194 | TACCTGCTCTGGCAGATTTCAA | CCGG | 10 |
| | 9KH | 9KH63 | | | | | | | |
| 51 | SLUCAS | E51SLCas | 31774081 | 31774107 | − | 2069 | GATGTTGGAGGTACCTGCTCTG | GCAG | 7 |
| | 9KH | 9KH64 | | | | | | | |
| 51 | SLUCAS | E51SLCas | 31774084 | 31774110 | − | 195 | CTTGATGTTGGAGGTACCTGCT | CTGG | 7 |
| | 9KH | 9KH65 | | | | | | | |
| 51 | SLUCAS | E51SLCas | 31774096 | 31774122 | − | 196 | AATGCCATCTTCCTTGATGTTG | GAGG | 22 |
| | 9KH | 9KH66 | | | | | | | |
| 51 | SLUCAS | E51SLCas | 31774097 | 31774123 | − | 2070 | AAATGCCATCTTCCTTGATGTT | GGAG | 19 |
| | 9KH | 9KH67 | | | | | | | |
| 51 | SLUCAS | E51SLCas | 31774099 | 31774125 | − | 19 | AGAAATGCCATCTTCCTTGATG | TTGG | 26 |
| | 9KH | 9KH68 | | | | | | | |
| 51 | SLUCAS | E51SLCas | 31774123 | 31774149 | − | 2071 | TAAGGAAACTGCCATCTCCAAA | CTAG | 41 |
| | 9KH | 9KH69 | | | | | | | |
| 51 | SLUCAS | E51SLCas | 31774144 | 31774170 | − | 198 | GGTGACACAACCTGTGGTTACT | AAGG | 6 |
| | 9KH | 9KH70 | | | | | | | |
| 51 | SLUCAS | E51SLCas | 31774145 | 31774171 | − | 2072 | TGGTGACACAACCTGTGGTTAC | TAAG | 10 |
| | 9KH | 9KH71 | | | | | | | |
| 51 | SLUCAS | E51SLCas | 31774153 | 31774179 | − | 199 | TGTTACTCTGGTGACACAACCT | GTGG | 22 |
| | 9KH | 9KH72 | | | | | | | |
| 51 | SLUCAS | E51SLCas | 31774168 | 31774194 | − | 200 | AGCTCCTACTCAGACTGTTACT | CTGG | 2 |
| | 9KH | 9KH73 | | | | | | | |
| 51 | SLUCAS | E51SLCas | 31774181 | 31774207 | − | 2073 | CCCAAAATATTTTAGCTCCTAC | TCAG | 10 |
| | 9KH | 9KH74 | | | | | | | |
| 51 | SLUCAS | E51SLCas | 31774192 | 31774218 | − | 2074 | TTTTGCAAAAACCCAAAATATT | TTAG | 43 |
| | 9KH | 9KH75 | | | | | | | |
| 53 | SACAS9 | E53SaCas | 31679352 | 31679380 | + | 1056 | AAAAGGTATCTTTGATACTAAC | CTTGGT | 45 |
| | KKH | 9KKH1 | | | | | | | |
| 53 | SACAS9 | E53SaCas | 31679361 | 31679389 | + | 1057 | CTTTGATACTAACCTTGGTTTC | TGTGAT | 20 |
| | KKH | 9KKH2 | | | | | | | |
| 53 | SACAS9 | E53SaCas | 31679373 | 31679401 | + | 25 | CCTTGGTTTCTGTGATTTTCTT | TTGGAT | 122 |
| | KKH | 9KKH3 | | | | | | | |
| 53 | SACAS9 | E53SaCas | 31679477 | 31679505 | + | 26 | TCCTTAGCTTCCAGCCATTGTG | TTGAAT | 42 |
| | KKH | 9KKH4 | | | | | | | |
| 53 | SACAS9 | E53SaCas | 31679510 | 31679538 | + | 1058 | AACATTTCATTCAACTGTTGCC | TCCGGT | 46 |
| | KKH | 9KKH5 | | | | | | | |
| 53 | SACAS9 | E53SaCas | 31679519 | 31679547 | + | 1059 | TTCAACTGTTGCCTCCGGTTCT | GAAGGT | 9 |
| | KKH | 9KKH6 | | | | | | | |
| 53 | SACAS9 | E53SaCas | 31679543 | 31679571 | + | 1060 | AGGTGTTCTTGTACTTCATCCC | ACTGAT | 16 |
| | KKH | 9KKH7 | | | | | | | |
| 53 | SACAS9 | E53SaCas | 31679550 | 31679578 | + | 27 | CTTGTACTTCATCCCACTGATT | CTGAAT | 58 |
| | KKH | 9KKH8 | | | | | | | |
| 53 | SACAS9 | E53SaCas | 31679565 | 31679593 | + | 28 | ACTGATTCTGAATTCTTTCAAC | TAGAAT | 78 |
| | KKH | 9KKH9 | | | | | | | |
| 53 | SACAS9 | E53SaCas | 31679577 | 31679605 | + | 1061 | TTCTTTCAACTAGAATAAAAGG | AAAAAT | 86 |
| | KKH | 9KKH10 | | | | | | | |
| 53 | SACAS9 | E53SaCas | 31679581 | 31679609 | + | 1062 | TTCAACTAGAATAAAAGGAAAA | ATAAAT | 420 |
| | KKH | 9KKH11 | | | | | | | |
| 53 | SACAS9 | E53SaCas | 31679588 | 31679616 | + | 1063 | AGAATAAAAGGAAAAATAAATA | TATAGT | 5266 |
| | KKH | 9KKH12 | | | | | | | |
| 53 | SACAS9 | E53SaCas | 31679346 | 31679374 | − | 1064 | GTTAGTATCAAAGATACCTTTT | TAAAAT | 31 |
| | KKH | 9KKH13 | | | | | | | |
| 53 | SACAS9 | E53SaCas | 31679359 | 31679387 | − | 1065 | CACAGAAACCAAGGTTAGTATC | AAAGAT | 33 |
| | KKH | 9KKH14 | | | | | | | |
| 53 | SACAS9 | E53SaCas | 31679368 | 31679396 | − | 1066 | AAAGAAAATCACAGAAACCAAG | GTTAGT | 456 |
| | KKH | 9KKH15 | | | | | | | |
| 53 | SACAS9 | E53SaCas | 31679372 | 31679400 | − | 1067 | TCCAAAAGAAAATCACAGAAAC | CAAGGT | 24 |
| | KKH | 9KKH16 | | | | | | | |
| 53 | SACAS9 | E53SaCas | 31679387 | 31679415 | − | 1068 | ATACAGTAGATGCAATCCAAAA | GAAAAT | 49 |
| | KKH | 9KKH17 | | | | | | | |
| 53 | SACAS9 | E53SaCas | 31679399 | 31679427 | − | 1069 | AGGAGGGTCCCTATACAGTAGA | TGCAAT | 13 |
| | KKH | 9KKH18 | | | | | | | |
| 53 | SACAS9 | E53SaCas | 31679404 | 31679432 | − | 1070 | ATGGAAGGAGGGTCCCTATACA | GTAGAT | 20 |
| | KKH | 9KKH19 | | | | | | | |
| 53 | SACAS9 | E53SaCas | 31679408 | 31679436 | − | 1071 | AGTCATGGAAGGAGGGTCCCTA | TACAGT | 27 |
| | KKH | 9KKH20 | | | | | | | |
| 53 | SACAS9 | E53SaCas | 31679419 | 31679447 | − | 29 | AGCCAAGCTTGAGTCATGGAAG | GAGGGT | 36 |
| | KKH | 9KKH21 | | | | | | | |
| 53 | SACAS9 | E53SaCas | 31679433 | 31679461 | − | 30 | TTAGGACAGGCCAGAGCCAAGC | TTGAGT | 30 |
| | KKH | 9KKH22 | | | | | | | |
| 53 | SACAS9 | E53SaCas | 31679462 | 31679490 | − | 1072 | TGGAAGCTAAGGAAGAAGCTGA | GCAGGT | 103 |
| | KKH | 9KKH23 | | | | | | | |
| 53 | SACAS9 | E53SaCas | 31679493 | 31679521 | − | 1073 | AATGAAATGTTAAAGGATTCAA | CACAAT | 200 |
| | KKH | 9KKH24 | | | | | | | |
| 53 | SACAS9 | E53SaCas | 31679503 | 31679531 | − | 31 | GCAACAGTTGAATGAAATGTTA | AAGGAT | 155 |
| | KKH | 9KKH25 | | | | | | | |
| 53 | SACAS9 | E53SaCas | 31679513 | 31679541 | − | 1074 | AGAACCGGAGGCAACAGTTGAA | TGAAAT | 11 |
| | KKH | 9KKH26 | | | | | | | |
| 53 | SACAS9 | E53SaCas | 31679518 | 31679546 | − | 32 | CCTTCAGAACCGGAGGCAACAG | TTGAAT | 8 |
| | KKH | 9KKH27 | | | | | | | |
| 53 | SACAS9 | E53SaCas | 31679523 | 31679551 | − | 1075 | GAACACCTTCAGAACCGGAGGC | AACAGT | 10 |
| | KKH | 9KKH28 | | | | | | | |
| 53 | SACAS9 | E53SaCas | 31679555 | 31679583 | − | 1076 | AAAGAATTCAGAATCAGTGGGA | TGAAGT | 106 |
| | KKH | 9KKH29 | | | | | | | |
| 53 | SACAS9 | E53SaCas | 31679560 | 31679588 | − | 33 | AGTTGAAAGAATTCAGAATCAG | TGGGAT | 110 |
| | KKH | 9KKH30 | | | | | | | |
| 53 | SACAS9 | E53SaCas | 31679565 | 31679593 | − | 1077 | ATTCTAGTTGAAAGAATTCAGA | ATCAGT | 134 |
| | KKH | 9KKH31 | | | | | | | |
| 53 | SACAS9 | E53SaCas | 31679569 | 31679597 | − | 34 | TTTTATTCTAGTTGAAAGAATT | CAGAAT | 399 |
| | KKH | 9KKH32 | | | | | | | |
| 53 | SACAS9 | E53SaCas | 31679576 | 31679604 | − | 35 | TTTTTCCTTTTATTCTAGTTGA | AAGAAT | 475 |
| | KKH | 9KKH33 | | | | | | | |
| 53 | SACAS9 | E53SaCas | 31679585 | 31679613 | − | 1078 | ATATATTTATTTTTCCTTTTAT | TCTAGT | 2133 |
| | KKH | 9KKH34 | | | | | | | |
| 53 | SLUCAS | E53SLCas | 31679353 | 31679379 | + | 201 | AAAGGTATCTTTGATACTAACC | TTGG | 13 |
| | 9KH | 9KH1 | | | | | | | |
| 53 | SLUCAS | E53SLCas | 31679373 | 31679399 | + | 202 | CCTTGGTTTCTGTGATTTTCTT | TTGG | 51 |
| | 9KH | 9KH2 | | | | | | | |
| 53 | SLUCAS | E53SLCas | 31679391 | 31679417 | + | 2075 | TCTTTTGGATTGCATCTACTGT | ATAG | 18 |
| | 9KH | 9KH3 | | | | | | | |
| 53 | SLUCAS | E53SLCas | 31679392 | 31679418 | + | 203 | CTTTTGGATTGCATCTACTGTA | TAGG | 12 |
| | 9KH | 9KH4 | | | | | | | |
| 53 | SLUCAS | E53SLCas | 31679393 | 31679419 | + | 204 | TTTTGGATTGCATCTACTGTAT | AGGG | 15 |
| | 9KH | 9KH5 | | | | | | | |
| 53 | SLUCAS | E53SLCas | 31679414 | 31679440 | + | 2076 | TAGGGACCCTCCTTCCATGACT | CAAG | 11 |
| | 9KH | 9KH6 | | | | | | | |
| 53 | SLUCAS | E53SLCas | 31679419 | 31679445 | + | 205 | ACCCTCCTTCCATGACTCAAGC | TTGG | 11 |
| | 9KH | 9KH7 | | | | | | | |
| 53 | SLUCAS | E53SLCas | 31679425 | 31679451 | + | 206 | CTTCCATGACTCAAGCTTGGCT | CTGG | 10 |
| | 9KH | 9KH8 | | | | | | | |
| 53 | SLUCAS | E53SLCas | 31679436 | 31679462 | + | 2077 | CAAGCTTGGCTCTGGCCTGTCC | TAAG | 16 |
| | 9KH | 9KH9 | | | | | | | |
| 53 | SLUCAS | E53SLCas | 31679446 | 31679472 | + | 2078 | TCTGGCCTGTCCTAAGACCTGC | TCAG | 18 |
| | 9KH | 9KH10 | | | | | | | |
| 53 | SLUCAS | E53SLCas | 31679458 | 31679484 | + | 2079 | TAAGACCTGCTCAGCTTCTTCC | TTAG | 16 |
| | 9KH | 9KH11 | | | | | | | |
| 53 | SLUCAS | E53SLCas | 31679465 | 31679491 | + | 2080 | TGCTCAGCTTCTTCCTTAGCTT | CCAG | 24 |
| | 9KH | 9KH12 | | | | | | | |
| 53 | SLUCAS | E53SLCas | 31679511 | 31679537 | + | 207 | ACATTTCATTCAACTGTTGCCT | CCGG | 15 |
| | 9KH | 9KH13 | | | | | | | |
| 53 | SLUCAS | E53SLCas | 31679519 | 31679545 | + | 2081 | TTCAACTGTTGCCTCCGGTTCT | GAAG | 6 |
| | 9KH | 9KH14 | | | | | | | |
| 53 | SLUCAS | E53SLCas | 31679520 | 31679546 | + | 208 | TCAACTGTTGCCTCCGGTTCTG | AAGG | 4 |
| | 9KH | 9KH15 | | | | | | | |
| 53 | SLUCAS | E53SLCas | 31679564 | 31679590 | + | 2082 | CACTGATTCTGAATTCTTTCAA | CTAG | 32 |
| | 9KH | 9KH16 | | | | | | | |
| 53 | SLUCAS | E53SLCas | 31679572 | 31679598 | + | 2083 | CTGAATTCTTTCAACTAGAATA | AAAG | 71 |
| | 9KH | 9KH17 | | | | | | | |
| 53 | SLUCAS | E53SLCas | 31679573 | 31679599 | + | 209 | TGAATTCTTTCAACTAGAATAA | AAGG | 48 |
| | 9KH | 9KH18 | | | | | | | |
| 53 | SLUCAS | E53SLCas | 31679589 | 31679615 | + | 2084 | GAATAAAAGGAAAAATAAATAT | ATAG | 574 |
| | 9KH | 9KH19 | | | | | | | |
| 53 | SLUCAS | E53SLCas | 31679592 | 31679618 | + | 2085 | TAAAAGGAAAAATAAATATATA | GTAG | 765 |
| | 9KH | 9KH20 | | | | | | | |
| 53 | SLUCAS | E53SLCas | 31679361 | 31679387 | − | 2086 | CACAGAAACCAAGGTTAGTATC | AAAG | 6 |
| | 9KH | 9KH21 | | | | | | | |
| 53 | SLUCAS | E53SLCas | 31679369 | 31679395 | − | 2087 | AAGAAAATCACAGAAACCAAGG | TTAG | 88 |
| | 9KH | 9KH22 | | | | | | | |
| 53 | SLUCAS | E53SLCas | 31679373 | 31679399 | − | 210 | CCAAAAGAAAATCACAGAAACC | AAGG | 52 |
| | 9KH | 9KH23 | | | | | | | |
| 53 | SLUCAS | E53SLCas | 31679374 | 31679400 | − | 2088 | TCCAAAAGAAAATCACAGAAAC | CAAG | 75 |
| | 9KH | 9KH24 | | | | | | | |
| 53 | SLUCAS | E53SLCas | 31679382 | 31679408 | − | 2089 | AGATGCAATCCAAAAGAAAATC | ACAG | 89 |
| | 9KH | 9KH25 | | | | | | | |
| 53 | SLUCAS | E53SLCas | 31679392 | 31679418 | − | 2090 | CCTATACAGTAGATGCAATCCA | AAAG | 4 |
| | 9KH | 9KH26 | | | | | | | |
| 53 | SLUCAS | E53SLCas | 31679406 | 31679432 | − | 2091 | ATGGAAGGAGGGTCCCTATACA | GTAG | 8 |
| | 9KH | 9KH27 | | | | | | | |
| 53 | SLUCAS | E53SLCas | 31679409 | 31679435 | − | 2092 | GTCATGGAAGGAGGGTCCCTAT | ACAG | 12 |
| | 9KH | 9KH28 | | | | | | | |
| 53 | SLUCAS | E53SLCas | 31679420 | 31679446 | − | 211 | GCCAAGCTTGAGTCATGGAAGG | AGGG | 10 |
| | 9KH | 9KH29 | | | | | | | |
| 53 | SLUCAS | E53SLCas | 31679421 | 31679447 | − | 212 | AGCCAAGCTTGAGTCATGGAAG | GAGG | 21 |
| | 9KH | 9KH30 | | | | | | | |
| 53 | SLUCAS | E53SLCas | 31679422 | 31679448 | − | 2093 | GAGCCAAGCTTGAGTCATGGAA | GGAG | 14 |
| | 9KH | 9KH31 | | | | | | | |
| 53 | SLUCAS | E53SLCas | 31679424 | 31679450 | − | 213 | CAGAGCCAAGCTTGAGTCATGG | AAGG | 18 |
| | 9KH | 9KH32 | | | | | | | |
| 53 | SLUCAS | E53SLCas | 31679425 | 31679451 | − | 2094 | CCAGAGCCAAGCTTGAGTCATG | GAAG | 18 |
| | 9KH | 9KH33 | | | | | | | |
| 53 | SLUCAS | E53SLCas | 31679428 | 31679454 | − | 214 | AGGCCAGAGCCAAGCTTGAGTC | ATGG | 23 |
| | 9KH | 9KH34 | | | | | | | |
| 53 | SLUCAS | E53SLCas | 31679434 | 31679460 | − | 2095 | TAGGACAGGCCAGAGCCAAGCT | TGAG | 17 |
| | 9KH | 9KH35 | | | | | | | |
| 53 | SLUCAS | E53SLCas | 31679440 | 31679466 | − | 2096 | AGGTCTTAGGACAGGCCAGAGC | CAAG | 23 |
| | 9KH | 9KH36 | | | | | | | |
| 53 | SLUCAS | E53SLCas | 31679445 | 31679471 | − | 2097 | TGAGCAGGTCTTAGGACAGGCC | AGAG | 27 |
| | 9KH | 9KH37 | | | | | | | |
| 53 | SLUCAS | E53SLCas | 31679447 | 31679473 | − | 2098 | GCTGAGCAGGTCTTAGGACAGG | CCAG | 35 |
| | 9KH | 9KH38 | | | | | | | |
| 53 | SLUCAS | E53SLCas | 31679451 | 31679477 | − | 215 | AGAAGCTGAGCAGGTCTTAGGA | CAGG | 44 |
| | 9KH | 9KH39 | | | | | | | |
| 53 | SLUCAS | E53SLCas | 31679452 | 31679478 | − | 2099 | AAGAAGCTGAGCAGGTCTTAGG | ACAG | 16 |
| | 9KH | 9KH40 | | | | | | | |
| 53 | SLUCAS | E53SLCas | 31679456 | 31679482 | − | 216 | AAGGAAGAAGCTGAGCAGGTCT | TAGG | 53 |
| | 9KH | 9KH41 | | | | | | | |
| 53 | SLUCAS | E53SLCas | 31679457 | 31679483 | − | 2100 | TAAGGAAGAAGCTGAGCAGGTC | TTAG | 25 |
| | 9KH | 9KH42 | | | | | | | |
| 53 | SLUCAS | E53SLCas | 31679463 | 31679489 | − | 217 | GGAAGCTAAGGAAGAAGCTGAG | CAGG | 70 |
| | 9KH | 9KH43 | | | | | | | |
| 53 | SLUCAS | E53SLCas | 31679464 | 31679490 | − | 2101 | TGGAAGCTAAGGAAGAAGCTGA | GCAG | 52 |
| | 9KH | 9KH44 | | | | | | | |
| 53 | SLUCAS | E53SLCas | 31679467 | 31679493 | − | 2102 | GGCTGGAAGCTAAGGAAGAAGC | TGAG | 41 |
| | 9KH | 9KH45 | | | | | | | |
| 53 | SLUCAS | E53SLCas | 31679472 | 31679498 | − | 2103 | ACAATGGCTGGAAGCTAAGGAA | GAAG | 27 |
| | 9KH | 9KH46 | | | | | | | |
| 53 | SLUCAS | E53SLCas | 31679475 | 31679501 | − | 2104 | AACACAATGGCTGGAAGCTAAG | GAAG | 18 |
| | 9KH | 9KH47 | | | | | | | |
| 53 | SLUCAS | E53SLCas | 31679478 | 31679504 | − | 218 | TTCAACACAATGGCTGGAAGCT | AAGG | 87 |
| | 9KH | 9KH48 | | | | | | | |
| 53 | SLUCAS | E53SLCas | 31679479 | 31679505 | − | 2105 | ATTCAACACAATGGCTGGAAGC | TAAG | 24 |
| | 9KH | 9KH49 | | | | | | | |
| 53 | SLUCAS | E53SLCas | 31679484 | 31679510 | − | 2106 | AAAGGATTCAACACAATGGCTG | GAAG | 12 |
| | 9KH | 9KH50 | | | | | | | |
| 53 | SLUCAS | E53SLCas | 31679487 | 31679513 | − | 219 | GTTAAAGGATTCAACACAATGG | CTGG | 12 |
| | 9KH | 9KH51 | | | | | | | |
| 53 | SLUCAS | E53SLCas | 31679491 | 31679517 | − | 220 | AAATGTTAAAGGATTCAACACA | ATGG | 37 |
| | 9KH | 9KH52 | | | | | | | |
| 53 | SLUCAS | E53SLCas | 31679505 | 31679531 | − | 221 | GCAACAGTTGAATGAAATGTTA | AAGG | 28 |
| | 9KH | 9KH53 | | | | | | | |
| 53 | SLUCAS | E53SLCas | 31679506 | 31679532 | − | 2107 | GGCAACAGTTGAATGAAATGTT | AAAG | 25 |
| | 9KH | 9KH54 | | | | | | | |
| 53 | SLUCAS | E53SLCas | 31679524 | 31679550 | − | 2108 | AACACCTTCAGAACCGGAGGCA | ACAG | 7 |
| | 9KH | 9KH55 | | | | | | | |
| 53 | SLUCAS | E53SLCas | 31679530 | 31679556 | − | 222 | TACAAGAACACCTTCAGAACCG | GAGG | 10 |
| | 9KH | 9KH56 | | | | | | | |
| 53 | SLUCAS | E53SLCas | 31679531 | 31679557 | − | 2109 | GTACAAGAACACCTTCAGAACC | GGAG | 10 |
| | 9KH | 9KH57 | | | | | | | |
| 53 | SLUCAS | E53SLCas | 31679533 | 31679559 | − | 223 | AAGTACAAGAACACCTTCAGAA | CCGG | 17 |
| | 9KH | 9KH58 | | | | | | | |
| 53 | SLUCAS | E53SLCas | 31679539 | 31679565 | − | 2110 | GGGATGAAGTACAAGAACACCT | TCAG | 18 |
| | 9KH | 9KH59 | | | | | | | |
| 53 | SLUCAS | E53SLCas | 31679550 | 31679576 | − | 2111 | TCAGAATCAGTGGGATGAAGTA | CAAG | 27 |
| | 9KH | 9KH60 | | | | | | | |
| 53 | SLUCAS | E53SLCas | 31679556 | 31679582 | − | 2112 | AAGAATTCAGAATCAGTGGGAT | GAAG | 27 |
| | 9KH | 9KH61 | | | | | | | |
| 53 | SLUCAS | E53SLCas | 31679562 | 31679588 | − | 224 | AGTTGAAAGAATTCAGAATCAG | TGGG | 95 |
| | 9KH | 9KH62 | | | | | | | |
| 53 | SLUCAS | E53SLCas | 31679563 | 31679589 | − | 225 | TAGTTGAAAGAATTCAGAATCA | GTGG | 33 |
| | 9KH | 9KH63 | | | | | | | |
| 53 | SLUCAS | E53SLCas | 31679566 | 31679592 | − | 2113 | TTCTAGTTGAAAGAATTCAGAA | TCAG | 43 |
| | 9KH | 9KH64 | | | | | | | |
| 53 | SLUCAS | E53SLCas | 31679572 | 31679598 | − | 2114 | CTTTTATTCTAGTTGAAAGAAT | TCAG | 61 |
| | 9KH | 9KH65 | | | | | | | |
| 53 | SLUCAS | E53SLCas | 31679579 | 31679605 | − | 2115 | ATTTTTCCTTTTATTCTAGTTG | AAAG | 122 |
| | 9KH | 9KH66 | | | | | | | |
| 53 | SLUCAS | E53SLCas | 31679586 | 31679612 | − | 2116 | TATATTTATTTTTCCTTTTATT | CTAG | 978 |
| | 9KH | 9KH67 | | | | | | | |

[0218] In some embodiments, the payload comprises a single nucleic acid molecule comprising: i) a nucleic acid encoding Staphylococcus aureus Cas9 (SaCas9) or Staphylococcus lugdunensis (SluCas9) and at least one, at least two, or at least three guide RNAs; or ii) a nucleic acid encoding Staphylococcus aureus Cas9 (SaCas9) or Staphylococcus lugdunensis (SluCas9) and from one to n guide RNAs, wherein n is no more than the maximum number of guide RNAs that can be expressed from said nucleic acid; or iii) a nucleic acid encoding Staphylococcus aureus Cas9 (SaCas9) or Staphylococcus lugdunensis (SluCas9) and one to three guide RNAs.

[0219] In some embodiments, the payload comprises at least two nucleic acid molecules comprising a first nucleic acid encoding Staphylococcus aureus Cas9 (SaCas9) or Staphylococcus lugdunensis (SluCas9); and a second nucleic acid that does not encode a SaCas9 or SluCas9 and encodes any one of i) at least one, at least two, at least three, at least four, at least five, or at least six guide RNAs; or ii) from one to n guide RNAs, wherein n is no more than the maximum number of guide RNAs that can be expressed from said nucleic acid; or iii) from one to six guide RNAs.

[0220] In some embodiments, the payload comprises at least two nucleic acid molecules comprising a first nucleic acid encoding Staphylococcus aureus Cas9 (SaCas9) or Staphylococcus lugdunensis (SluCas9) and i) at least one, at least two, or at least three guide RNAs; or ii) from one to n guide RNAs, wherein n is no more than the maximum number of guide RNAs that can be expressed from said nucleic acid; or iii) one to three guide RNAs; and a second nucleic acid that does not encode a SaCas9 or SluCas9, optionally wherein the second nucleic acid comprises any one of i) at least one, at least two, at least three, at least four, at least five, or at least six guide RNAs; or ii) from one to n guide RNAs, wherein n is no more than the maximum number of guide RNAs that can be expressed from said nucleic acid; or iii) from one to six guide RNAs.

[0221] In some embodiments, the payload comprises at least two nucleic acid molecules comprising a first nucleic acid encoding Staphylococcus aureus Cas9 (SaCas9) or Staphylococcus lugdunensis (SluCas9) and at least one, at least two, or at least three guide RNAs; and a second nucleic acid that does not encode a SaCas9 or SluCas9 and encodes from one to six guide RNAs.

[0222] In some embodiments, the payload comprises at least two nucleic acid molecules comprising a first nucleic acid encoding Staphylococcus aureus Cas9 (SaCas9) or Staphylococcus lugdunensis (SluCas9) and at least two guide RNAs, wherein at least one guide RNA binds upstream of sequence to be excised and at least one guide RNA binds downstream of sequence to be excised; and a second nucleic acid that does not encode a SaCas9 or SluCas9 and encodes at least one additional copy of the guide RNAs encoded in the first nucleic acid. In some embodiments, the guide RNA excises a portion of a DMD gene, optionally an exon, intron, or exon/intron junction.

[0223] In some embodiments, a payload is provided comprising, consisting of, or consisting essentially of at least two nucleic acid molecules comprising a first nucleic acid encoding Staphylococcus aureus Cas9 (SaCas9) or Staphylococcus lugdunensis (SluCas9) and a first and a second guide RNA that function to excise a portion of a DMD gene; and a second nucleic acid encoding at least 2 or at least 3 copies of the first guide RNA and at least 2 or at least 3 copies of the second guide RNA.

[0224] In some embodiments, a payload is provided comprising, consisting of, or consisting essentially of one or more nucleic acid molecules encoding an endonuclease and a pair of guide RNAs, wherein each guide RNA targets a different sequence in a DMD gene, wherein the endonuclease and pair of guide RNAs are capable of excising a target sequence in DNA that is between 5-250 nucleotides in length. In some embodiments, the endonuclease is a class 2, type II Cas endonuclease. In some embodiments, the class 2, type II Cas endonuclease is SpCas9, SaCas9, or SluCas9. In some embodiments, the endonuclease is not a class 2, type V Cas endonuclease. In some embodiments, the excised target sequence comprises a splice acceptor site or a splice donor site. In some embodiments, the excised target sequence comprises a premature stop codon in the DMD gene. In some embodiments, the excised target sequence does not comprise an entire exon of the DMD gene. In some embodiments, any of the methods and/or ribonucleoprotein complexes disclosed herein do not destroy/specifically alter the sequence of a splice acceptor site, splice donor site, or premature stop codon site.

### III. Methods

[0225] Disclosed herein are methods comprising (a) administering to a subject in need thereof an agent that blocks LDL binding to a low-density lipoprotein receptor (LDLR) and/or prevents LNP uptake into liver cells or tissue and concurrently or sequentially (b) administering an LNP or lipoplex, comprising a payload to the subject, wherein the agent reduces off-target delivery of the LNP or lipoplex to the liver.

[0226] Disclosed herein are methods of increasing the percentage of payload delivered to anon-liver target in a subject, comprising (a) a pre-conditioning step comprising administering to the subject a composition comprising an agent that blocks LDL binding to a low-density lipoprotein receptor (LDLR) in the liver, and then (b) administering an LNP, or lipoplex, and a payload to the subject.

[0227] Disclosed herein are methods of decreasing liver tropism of a payload administered in an LNP or lipoplex in a subject comprising (a) administering to the subject a composition comprising i) an agent that blocks low-density lipoprotein (LDL) binding to a low-density lipoprotein receptor (LDLR) and/or prevents LNP uptake into liver cells or tissue and ii) a delivery molecule, wherein the delivery molecule delivers the agent to the liver, and then (b) administering an LNP or lipoplex and a payload to the subject.

[0228] In some embodiments, administration of the composition comprising the agent that blocks LDL binding to LDLR (e.g., an ASO) temporarily blocks the delivery molecule (e.g., LNP) from interacting with the LDLR in the liver. In some embodiments, administration of the composition comprising the agent that blocks LDL binding to LDLR (e.g., ASO) increases the percentage of the agent delivered to the non-liver target.

[0229] In some embodiments, the methods comprise administering an agent that blocks LDL binding to an LDL receptor (LDLR) and a delivery molecule that delivers the agent to the liver and induces long-term blocking of LDL binding to LDLR, e.g., longer than about 3 weeks. In some embodiments, the blocking of LDL binding to LDL receptors in the liver is not temporary. In some embodiments, the blocking of LDL binding to LDL receptors in the liver is temporary.

[0230] In some embodiments, administering to a subject in need thereof a composition for blocking LDL binding to LDL receptors and/or for preventing LNP uptake into liver cells or tissue occurs prior to administering the LNP or lipoplex, and payload, for example at least about 2 days, about 3 days, about 4 days, about 5 days, about 6 days, about 7 days, about 8 days, about 9 days, about 10 days, about 11 days, about 12 days, about 13 days, about 14 days, about 15 days, about 16, days, about 17 days, about 18 days, about 19 days, about 20 days, or about 21 days prior to administering the LNP or lipoplex and payload. In some embodiments, the disclosure provides for a method of administering to a subject in need thereof a composition for blocking LDL binding to LDL receptors and/or for preventing LNP uptake into liver cells or tissue occurs prior to administering the LNP or lipoplex and payload, for example, at 1-2, 1-3, 2-5, 4-7, 6-9, 8-11, 10-13 or 12-15 days prior to administering the LNP or lipoplex. In some embodiments, the disclosure provides for a method of administering to a subject in need thereof a composition for blocking LDL binding to LDL receptors and/or for preventing LNP uptake into liver cells or tissue occurs prior to administering the LNP or lipoplex and payload, for example, at least 2-21 days, at least 2-3 days, at least 3-5 days, at least 7-14 days, at least 10-14 days, or at least 14-21 days prior to administering the LNP or lipoplex and payload. In some embodiments, the subject is administered more than one dose (e.g., 2, 3 or 4) of the agent that blocks LDL binding to the LDLR and/or prevents LNP uptake into liver cells or tissue prior to being administered the payload. In some embodiments, administration of the composition for blocking LDL binding to LDL receptors and/or for preventing LNP uptake into liver cells or tissue immediately precedes the administration of the LNP or lipoplex and payload. In some embodiments, the composition for blocking LDL binding to LDL receptors and/or for preventing LNP uptake into liver cells or tissue is co-administered with the LNP or lipoplex and payload. In some embodiments, the composition comprising an agent that blocks LDL binding to an LDL receptor (LDLR) and/or prevents LNP uptake into liver cells or tissue and the LNP or lipoplex, and payload are administered concurrently. In some embodiments, the composition comprising an agent that blocks LDL binding to an LDL receptor (LDLR) and/or for preventing LNP uptake into liver cells or tissue and the LNP or lipoplex and payload are administered sequentially.

[0231] In some embodiments, the composition that blocks LDL binding to an LDL receptor and/or prevents LNP uptake into liver cells or tissue (LDLR) comprises an RNAi (e.g., siRNA or ASO). In some embodiments, the composition that blocks LDL binding to an LDL receptor (LDLR) and/or prevents LNP uptake into liver cells or tissue comprises an antisense oligonucleotide (ASO). In some embodiments, the composition that blocks LDL binding to an LDL receptor (LDLR) and/or prevents LNP uptake into liver cells or tissue comprises an siRNA. In some embodiments, the composition that blocks LDL binding to an LDL receptor (LDLR) and/or prevents LNP uptake into liver cells or tissue comprises a non-RNAi, such as a small molecule, antibody, soluble receptor, or non-antibody inhibitor.

[0232] The method results in the non-liver payload being more effectively routed to the intended target by way of the decreased tropism to the liver.

[0233] In some embodiments, systemically or locally delivered agents are delivered to induce a temporary gene expression knockdown effect of about 50%, about 60%, about 70%, or about 80% from about 24 hours to about 48 hours to greater than or about 10 days. After the agent is administered and temporary knockdown of the LDLR is induced, non-liver payload-based therapy can be administered.

[0234] In some embodiments, the method includes administering an agent that is capable of temporarily blocking LDL binding to LDLR receptors and/or preventing LNP uptake into liver cells or tissue, including for about 48 hours to 3 weeks. In some embodiments, the RNAi molecules (e.g., any of the siRNAs or ASOs disclosed herein) and/or compositions are capable of blocking LDL binding to LDLR and/or preventing LNP uptake into liver cells or tissue for about 2 days, about 3 days, about 4 days, about 5 days, about 6 days, about 7 days, about 8 days, about 9 days, about 10 days, about 11 days, about 12 days, about 13 days, about 14 days, about 15 days, about 16, days, about 17 days, about 18 days, about 19 days, about 20 days, or about 21 days. In some embodiments, the RNAi molecules (e.g., any of the siRNAs or ASOs disclosed herein) and/or compositions are capable of blocking LDL binding to LDLR and/or preventing LNP uptake into liver cells or tissue for about 7 days, about 8 days, about 9 days, about 10 days, about 11 days, about 12 days, about 13 days, about 14 days. In some embodiments, the agent, e.g., RNAi molecule and/or composition disclosed herein is capable of blocking LDL binding to LDL receptors and/or preventing LNP uptake into liver cells or tissue in the liver for 1-28 days, 2-28 days, 3-28 days, 7-28 days, 10-28 days, 14-28 days, 21-28 days, 1-21 days, 2-21 days, 3-21 days, 7-21 days, 10-21 days, 14-21 days, 1-14 days, 2-14 days, 3-14 days, 7-14 days, 1-10 days, 2-10 days, 3-10 days, 7-10 days, 1-7 days, 2-7 days, 3-7 days, 1-4 days, 1-3 days, or about 24 hours to about 48 hours.

[0235] In some embodiments, the agent (e.g., RNAi molecule and/or composition disclosed herein) knocks down LDLR and comprises a ribonucleotide sequence at least 80% identical to a ribonucleotide sequence from the LDLR. Preferably, the agent is at least 90%, 95%, 96%, 97%, 98%, 99% or 100% identical to the ribonucleotide sequence of the target, or complement thereof. In some embodiments, an agent will be 100% identical to the nucleotide sequence or complement thereof of a target sequence. However, RNAi agents with insertions, deletions or single point mutations relative to a target may also be effective. Tools to assist siRNA design are readily available to the public and are known in the art.

[0236] In some embodiments, the subject is administered an amount of the agent that knocks down the levels of LDLR in the liver by at least 10%, 20%, 30%, 40%, 50%, 60%, 70%, 80%, 90%, 95%, or 99% as compared to a control subject not administered the agent. In some embodiments, the subject is administered an amount of the agent that knocks down the levels of LDLR in the liver by 80-100%, 80-95%, 10-90%, 10-70%, 10-50%, 10-30%, 30-90%, 30-70%, 30-50%, 50-90%, 50-70%, or 70-90% as compared to a control subject not administered the agent.

[0237] In some embodiments, the subject is administered an amount of the agent that knocks down the levels of LDLR in the liver for 1-28 days, 2-28 days, 3-28 days, 7-28 days, 10-28 days, 14-28 days, 21-28 days, 1-21 days, 2-21 days, 3-21 days, 7-21 days, 10-21 days, 14-21 days, 1-14 days, 2-14 days, 3-14 days, 7-14 days, 1-10 days, 2-10 days, 3-10 days, 7-10 days, 1-7 days, 2-7 days, 3-7 days, 1-4 days, 1-3 days, or about 24 hours to about 48 hours.

[0238] In some embodiments, the subject is administered an amount of an ASO or siRNA that knocks down the levels of LDLR in the liver by at least 10%, 20%, 30%, 40%, 50%, 60%, 70%, 80%, 90%, 95%, or 99% as compared to a control subject not administered the ASO or siRNA. In some embodiments, the subject is administered an amount of an ASO that knocks down the levels of LDLR in the liver by 80-100%, 80-95%, 10-90%, 10-70%, 10-50%, 10-30%, 30-90%, 30-70%, 30-50%, 50-90%, 50-70%, or 70-90% as compared to a control subject not administered the ASO or siRNA.

[0239] In some embodiments, the subject is administered an amount of the ASO or siRNA that knocks down the levels of LDLR in the liver for 1-28 days, 2-28 days, 3-28 days, 7-28 days, 10-28 days, 14-28 days, 21-28 days, 1-21 days, 2-21 days, 3-21 days, 7-21 days, 10-21 days, 14-21 days, 1-14 days, 2-14 days, 3-14 days, 7-14 days, 1-10 days, 2-10 days, 3-10 days, 7-10 days, 1-7 days, 2-7 days, 3-7 days, 1-4 days, 1-3 days, or about 24 hours to about 48 hours. In some embodiments, the subject is administered an amount of the ASO or siRNA that knocks down the levels of LDLR in the liver for 1-14 days, 2-14 days, 3-14 days, 7-14 days, 1-10 days, 2-10 days, 3-10 days, 7-10 days, 1-7 days, 2-7 days, 3-7 days, 1-4 days, 1-3 days, or about 24 hours to about 48 hours.

[0240] In some embodiments, the method includes administering an agent (e.g., any of the siRNAs or ASOs disclosed herein) in a delivery molecule. In some embodiments, the delivery molecule is lipid nanoparticle (LNP), a lipoplex, an adenoviral vector, or an AAV, optionally wherein the AAV is an AAV1, AAV2, AAV3, AAV4, AAV5, AAV6, AAV7, AAV8, AAVrh10, AAVrh74, AAV9, AAV9P, or Myo-AAV. In some embodiments, the method enhances their delivery and/or uptake by the liver. In some embodiments, the method includes administering siRNA conjugated to a lipid, such as cholesterol-conjugated siRNAs. In some embodiments, the method includes administering siRNA conjugated to at least one galactose or galactose derivative, including but not limited to lactose, galactose, N-acetylgalactosamine (GalNAc), GalNAc-6 (doi: 10.1038/s41467-023-37465-1), galactosamine, N-formylgalactosamine, N-acetylgalactosamine, N-propionylgalactosamine, Nn-butanoylgalactosamine, and N-isobutanoyl-galactosamine (Iobst, S T and Drickamer, K. JBC 1996, 271, 6686). In some embodiments, the method includes administering GalNAc-conjugated siRNAs. In some embodiments, the method includes administering GalNAc-6-conjugated siRNAs.

[0241] In some embodiments, the method includes administering a composition comprising siRNA delivered by non-viral tissue-specific delivery vehicles including but not limited to nanoparticles, liposomes, ribonucleoproteins, positively charged peptides, small molecule RNA-conjugates, aptamer-RNA chimeras, and RNA-fusion protein complexes.

[0242] Exemplary modes of administration of the composition for blocking LDL binding to LDL receptors in the liver, e.g., a conjugated siRNA or siRNA-LNP delivery system, include oral administration, parenteral administration, administration by injection (e.g., intravenous, subcutaneous, intramuscular, intrathecal (IT), intracerebroventricular (ICV), etc.), and any other suitable mode of administration. In some embodiments, administration of the agent for blocking LDL binding to LDL receptors in the liver (e.g., siRNA) and compositions thereof include intraocular administration, such as intravitreal, intraretinal, subretinal, subtenon, peri- and retro-orbital, trans-corneal and trans-scleral administration. In some embodiments, siRNA may be administered to a patient by intravenous injection, subcutaneous injection, oral delivery, liposome delivery or intranasal delivery. The siRNA may then accumulate in a target body system, organ, tissue or cell type of the patient.

[0243] In some embodiments, other drugs that facilitate increased uptake of an agent (e.g., siRNA) in the liver may also be co-administered with the agent (e.g., siRNA) conjugated to a liver-targeting moiety. In some embodiments, the method comprises co-administering a cholesterol-conjugated agent (e.g., siRNA) with a statin drug to block LDL binding to LDLR in the liver. In some embodiments, a statin drug can be co-administered with the cholesterol-agent to enhance uptake of cholesterol-conjugated agent in the liver. See US20150361432A1 for a general discussion regarding co-administering statin drugs with cholesterol-siRNA to increase the expression of LDL receptors on the surface of liver hepatocytes. As a consequence of the increase in LDL receptor expression, the level of cholesterol is lowered in plasma. Without wishing to be bound by theory, by administering a statin drug, the level of competing cholesterol in plasma is reduced and the level of LDL receptors for binding cholesterol-agent in the liver are increased, allowing for more efficient uptake of cholesterol labeled agent by hepatocytes. The statin can be administered before, with or after the administration of the cholesterol-agent.

[0244] In some embodiments, the method includes administering an LNP or lipoplex comprising a payload to the subject, including any of the payloads described herein. In some embodiments, the payload targets a non-liver tissue. In some embodiments, the method comprises administering to a subject the composition comprising an agent that blocks LDL binding to an LDL receptor (LDLR) and/or prevents LNP uptake into liver cells or tissue as part of the pre-conditioning treatment prior to receiving or administering the payload. In some embodiments, the payload is a component of a CRISPR/Cas system or a nucleic acid encoding one or more components thereof, a biologic, or a small molecule, optionally wherein the component of a CRISPR/Cas system comprises one or more guide RNAs, one or more scaffolds, and/or one or more endonucleases. In some embodiments, the payload is for gene therapy directed to the non-liver target tissue. In some embodiments, the composition for blocking LDL binding to LDL receptors in the liver and/or for preventing LNP uptake into liver cells or tissue is administered to a subject at least once before the administration of the payload directed to the non-liver target tissue. In some embodiments, the composition for blocking LDL binding to LDL receptors in the liver and/or for preventing LNP uptake into liver cells or tissue is administered to a subject at least once before the payload-based gene therapy as part of a pre-conditioning regimen that may include administering other agents.

[0245] In some embodiments, the payload that is administered comprises a component of a CRISPR/Cas system or a nucleic acid encoding one or more components thereof, a biologic, or a small molecule, optionally wherein the component of a CRISPR/Cas system comprises a nucleic acid encoding a guide RNA and/or an endonuclease for gene editing. The non-liver payload-based gene therapy includes treating or preventing a disease or disorder, such as a genetic disease or disorder, in a subject in need thereof that is not a disease or disorder of the liver. In some embodiments, the payload is intended for the brain; central nervous system; spinal cord; eye; retina; bone; cardiac muscle, skeletal muscle, and/or smooth muscle; lung; pancreas; heart; and/or kidney. In some embodiments, the payload is intended for cardiac muscle, skeletal muscle, and/or smooth muscle.

[0246] In particular embodiments, the payload that is administered is in a lipid nanoparticle (LNP). In some embodiments, the LNP targets the brain; spinal cord; eye; retina; bone; cardiac muscle, skeletal muscle, and/or smooth muscle; lung; pancreas; heart; and/or kidney. In some embodiments, the LNP targets cardiac muscle, skeletal muscle, and/or smooth muscle.

[0247] In some embodiments, the method results in an increased percentage of payload delivered to the non-liver target. In some embodiments, the method results in at least a 10%, 30%, 50%, 75%, 100%, 125%, 150%, 200%, 250%, 300%, 350%, 400%, 450%, 500%, 600%, 700%, 800%, 900%, or 1000% increase of payload in a non-liver target, including the brain, spinal cord, eye, retina, bone, cardiac muscle, skeletal muscle, and/or smooth muscle, lung, pancreas, heart, and/or kidney of the subject receiving the agent that blocks LDL binding to an LDL receptor (LDLR) in the liver and/or prevents LNP uptake into liver cells or tissue and subsequently a payload, as compared to the payload in the corresponding tissue of a control subject that received the payload but did not receive the agent that blocks LDL binding to an LDL receptor (LDLR) in the liver and/or prevents LNP uptake into liver cells or tissue. In some embodiments, the method results in a 10-50%, 50-100%, 100-250%, 250-500%, 500-750%, 750-1000%, or 1000-2000% increase of payload in a non-liver target, including the brain, central nervous system, spinal cord, eye, retina, bone, cardiac muscle, skeletal muscle, smooth muscle, lung, pancreas, heart, and/or kidney of the subject receiving the agent that blocks LDL binding to an LDL receptor (LDLR) in the liver and/or prevents LNP uptake into liver cells or tissue and subsequently a payload as compared to the payload in the corresponding tissue of a control subject that received the payload but did not receive the agent that blocks LDL binding to an LDLR receptor (LDLR) in the liver and/or prevents LNP uptake into liver cells or tissue.

[0248] In some embodiments, the method results in at least a 10%, 30%, 50%, 75%, 100%, 125%, 150%, 200%, 250%, 300%, 350%, 400%, 450%, 500%, 600%, 700%, 800%, 900%, or 1000% increase of payload in skeletal muscle of the subject receiving the agent that blocks LDL binding to an LDL receptor (LDLR) in the liver and/or prevents LNP uptake into liver cells or tissue and subsequently a payload, as compared to the payload in the muscle of a control subject that received the payload but did not receive the agent. In some embodiments, the method results in a 10-50%, 50-100%, 100-250%, 250-500%, 500-750%, 750-1000%, or 1000-2000% increase of payload in skeletal muscle of the subject receiving the agent that blocks LDL binding to an LDL receptor (LDLR) in the liver and subsequently a payload, as compared to the payload in the muscle of a control subject that received the payload but did not receive the agent.

[0249] In some embodiments, the non-liver payload-based therapy is used to treat a genetic disease or disorder, where the disorder is a muscle disease or disorder. The muscle disease or disorder may be selected from, for example, Duchenne Muscular Dystrophy (DMD), Becker muscular dystrophy (BMD), Emery-Dreifuss dystrophy, myotonic dystrophy, limb-girdle muscular dystrophy, oculopharyngeal muscular dystrophy, congenital dystrophy, familial periodic paralysis. In some embodiments, the muscle disease or disorder may be mitochondrial oxidative phosphorylation disorder, or a glycogen storage disease (e.g., von Gierke's disease, Pompe's disease, Forbes-Cori disease, Andersen's disease, McArdle's disease, Hers' disease, Tarui's disease, or Fanconi-Bickel syndrome.) In particular embodiments, the non-liver payload-based gene therapy is used to treat DMD. In some embodiments, the non-liver payload-based therapy is used to treat myotonic dystrophy.

[0250] In some embodiments, the method includes administering a single payload or multiple payloads that have a non-liver target. In some embodiments, the payload-based therapy involves administering CRISPR-Cas components, any of which are known in the art. In some embodiments, the method includes administering one or more payloads comprising a nucleic acid encoding a Cas9 protein. Such embodiments include for example, one or more nucleic acids encoding Staphylococcus aureus (SaCas9) and/or Staphylococcus lugdunensis (SluCas9) and further comprising a nucleic acid encoding one or more guide RNAs. In such embodiments, the nucleic acid encoding the Cas9 protein is under the control of a CK8e promoter. In some embodiments, the nucleic acid encoding the guide RNA sequence is under the control of a hU6c promoter. In some embodiments, in addition to guide RNA and Cas9 sequences, the payloads further comprise nucleic acids that do not encode guide RNAs. In some embodiments, the payload vector comprises one or more nucleotide sequence(s) encoding a crRNA, a trRNA, or a crRNA and trRNA. A discussion of different payload compositions useful in the present methods, including exemplary guide RNAs, promoters, and particular spacer sequences are disclosed in WO2022/056000 and elsewhere herein.

[0251] In particular embodiments, the non-liver target is the muscle, and the method comprises administering a payload to the subject subsequent to administering to a subject an agent that blocks LDL binding to an LDL receptor (LDLR) in the liver and/or prevents LNP uptake into liver cells or tissue. In particular embodiments, the method comprises administering a payload targeting the muscle subsequent to a pre-conditioning step comprising administering to the subject a composition comprising an agent that blocks LDL binding to an LDL receptor (LDLR) in the liver and/or prevents LNP uptake into liver cells or tissue, wherein the pre-conditioning step increases the percentage of payload delivered to the non-liver target. In particular embodiments, the non-liver payload-based gene therapy is used to treat DMD. In such embodiments, the guide RNAs comprise as non-limiting examples the guide sequences disclosed in Tables 1A, 1B, and Table 2. For example, when the payload comprises SaCas9, one or more spacer sequences is selected from any one of SEQ ID NOs: 1-35, 1000-1078, and 3000-3069; or when the payload vector comprises SluCas9, one or more spacer sequences selected from any one of SEQ ID NOs: 100-225, 2000-2116, and 4000-4251.

[0252] In some embodiments, the methods include administering a payload that further comprises molecules for enhancing tropism for the target host cells or tissue. Uptake of the payload by vascular endothelial and other target cell types can further be enhanced by using payloads that further comprise one or more molecules for enhancing tropism of the vector for particular target host cells. In some embodiments, the one or more molecules for enhancing tropism are proteins. In some embodiments, the one or more molecules for enhancing tropism of the viral vector are peptides. In some embodiments, the one or more peptides target the viral vector to proteins upregulated in cells associated with the particular genetic disease or disorder to be treated. Such peptides and proteins are known in the art for enhancing tropism toward target host cells and may be incorporated into the payload through any of various methodologies known in the art.

[0253] Exemplary modes of administration of the non-liver payload-based gene therapy include oral, rectal, transmucosal, topical, transdermal, inhalation, parenteral (e.g., intravenous, subcutaneous, intradermal, intramuscular, and intra-articular, as well as direct tissue or organ injection, alternatively, intrathecal, direct intramuscular, intraventricular, intravenous, intraperitoneal, intranasal, or intraocular injections. Injectables can be prepared in conventional forms, either as liquid solutions or suspensions, solid forms suitable for solution or suspension in liquid prior to injection, or as emulsions. Alternatively, a virus may be administered locally, for example in a depot or sustained-release formulation.

[0254] In some embodiments, the subject is a human subject. In some embodiments, the subject is being treated for a genetic disease or a disorder that is not a disease or disorder of the liver. In some embodiments, the subject is being treated for a muscle disease or disorder. In some embodiments, the subject has been or is being treated with a non-liver payload-based gene therapy.

### EXAMPLES

[0255] The following examples are provided to illustrate certain disclosed embodiments and are not to be construed as limiting the scope of this disclosure in any way.

### 1. Example 1: Study of the Effect of LDLR mRNA Knockdown in Liver Cells

[0256] To evaluate the knockdown effects of anti-LDLR siRNA in liver cells, liver cell models were transfected with siRNAs targeting LDLR (anti-LDLR siRNA). Cells were lysed for mRNA and protein extraction followed by qRT-PCR (mRNA) analysis to assess the degree of LDLR mRNA knockdown.

### a) Dose Response (CRO)

[0257] Hepa1-6 cells were seeded at a density of 20 k cells per well in 96-well tissue culture plates. Cells were immediately transfected with siRNAs targeting mmLDLR (Mus musculus low density lipoprotein receptor, Gene ID: 16835) at 10 different doses using Lipofectamine 2000 (Invitrogen 11668027). A Quantigene 2.0 branched DNA (bDNA) probe set was designed for the target mRNAs. Relative mmLdlr/mmGAPDH ratios were normalized to the respective mean ratio in mock treated cells and cells were transfected with a control siRNA targeting.

[0258] FIGS. 1A-1J show the effects of siRNA concentration on relative mRNA expression and show 10-point dose response curves for each of the 10 siRNA sequences evaluated, set forth in Table 3A (wherein each duplex siRNA shown comprises a pair of amino acid sequences of SEQ ID NOs: 4300 and 9965 [FIG. 1A], 4301 and 9966 [FIG. 1B], 4302 and 9967 [FIG. 1C], 4303 and 9968 [FIG. 1D], 4304 and 9969 [FIG. 1E], 4305 and 9970 [FIG. 1F], 4306 and 9971 [FIG. 1G], 4307 and 9972 [FIG. 1H], 4308 and 9973 [FIG. 1I], or 4309 and 9974 [FIG. 1J]). The top performing mmLDLR-targeting siRNAs were used in subsequent studies.

b) Candidate siRNA Screening LDLR in Hepa1-6 Cells

[0259] Hepa1-6 cells were seeded at 15 k per well in a 96-well tissue culture plate and grown for 48 h in growth media DMEM supplemented with 10% FBS and PenStrep. The next day, cells were treated with 2.5 nM (left column of modality in FIG. 2) or 50 nM (right column of modality in FIG. 2) of siRNA mixed with Opti-MEM (GIBCO, 31985062) and combined with mixture of Lipofectamine RNAiMAx Transfection reagent (Invitrogen, 13778150) and incubated for 15 min at room temperature as per the manufacturer procedure. Untreated cells were left until the media was changed.

[0260] After 48 hours post-dosing, cells were frozen at −80 degrees C., and then lysed using lysis buffer from Cells-to-CT 1-step TaqMan Kit (Invitrogen A25603). qPCR was run on Quantstudio 6 flex using mastermix from Cells-to-CT 1-step TaqMan Kit (Invitrogen A25603). 20 ul reactions were conducted in technical triplicate or quadruplicates for each RNA sample according to user manual. 2 ul of lysate was added to each reaction and Taqman probes (Mus muscus): LDLR: FAM Mm01151337_m1 and Act-B: VIC Mm02619580_g1 were used. Delta Delta Ct analysis was conducted to find fold change in relation to untreated control samples.

[0261] FIG. 2 shows the amount of relative LDLR expression fold change normalized to scramble mean from the same concentration.

### 2. Example 2: In Vivo Study to Determine Kinetics of Liver LDLR Knockdown by GalNAc-Conjugated siRNA or siRNA-LNP

[0262] To evaluate the effects of anti-LDLR siRNA administration on liver LDLR knockdown in a mouse model, wild-type mice was pre-conditioned with either a siRNA targeting LDLR (anti-LDLR) with GalNAc (siRNA-GalNAc) or a liver-targeted siRNA-LNP.

[0263] A single dose of SiRNA-LNP or siRNA-GalNac targeting LDLR was administrated via subcutaneous (siRNA-GalNAc) or intravenous (siRNA-LNP), routs of administration at the dose of 20 mg/kg for siRNA-GalNAc and 3 mg/kg for siRNA-LNP, and the mice were euthanized at 1-, 2-, 3-, 5-, or 7-day post injection for sample analysis.

[0264] As described below, the level of LDL receptor (LDLR) protein in liver was assessed via the capillary gel electrophoresis system ProteinSimple “Jess” and relative RT-qPCR measurement of LDLR mRNA. LDL-cholesterol level was measured using Fujifilm Wako colorimetric kit. A representative image of Jess blot for selected samples from Day 1 and LDLR recombinant protein is shown in FIG. 5A.

### a) LNP Formulation

[0265] The LNP lipid composition by mole fraction was: 50% LP-01 (BP-26809, BroadPharm) as the ionizable lipid, 9% DSPC (850365, Avanti Polar Lipids), 39% Cholesterol (C3045, Milipore Sigma), and 2% DMG-PEG2000 (880151, Avanti Polar Lipids). The duplex siRNA with a sense sequence comprising SEQ ID NO: 4306 and an antisense sequence comprising SEQ ID NO: 9971 was loaded as cargo.

### b) Formulation

[0266] The siRNA solution in 50 mM Citrate buffer at pH 4.5 buffer (aqueous phase) and lipid mixture in ethanol (lipid phase) was loaded onto microfluidic mixing device (Ignite, NanoAssembler, Precision Nanosystems) and run at 3:1 (RNA to lipid) flow rate with total flow rate of 12 mL/min. The LNP were collected and left at 4 degrees C. for 30 min for maturation, dialyzed in 50 mM Tris Buffer (pH 7.5) and concentrated and frozen in 100 mM sucrose at −80 C.

c) LDLR mRNA Knockdown

[0267] Mouse liver tissues, prepared as described above, were frozen at −80 degrees C. at corresponding time points. RNA was extracted from tissues using homogenization and lysis buffer from Cells-to-CT 1-step TaqMan Kit (Invitrogen A25603). qPCR was run on Quantstudio 6 flex using mastermix from Cells-to-CT 1-step TaqMan Kit (Invitrogen A25603). 20 ul reactions were conducted in technical triplicates for each RNA sample according to the user manual. 2 ul of lysate was added to each reaction and Taqman probes targeting: LDL-r Mm01151337_m1 LDLR, and B-actin (house keeping gene): Mm02619580_g1 were used. Delta Delta Ct analysis was conducted to find fold change in relation to untreated control sample.

[0268] Results are shown in FIG. 4.

### d) LDLR Protein Knockdown

[0269] The LDLR levels in protein lysate derived from mouse liver tissue, prepared as described above, were quantitated on a capillary western system, which is an automated plate-based, transfer-free system.

[0270] Briefly, protein was extracted from frozen tissue (10-20 mg) using a BeadRuptor bead mill homogenizer submerged in 10% SDS buffer (1 mM EDTA pH8, 100 mM NaCl, 62.5 mM Tris pH 6.5, 10% SDS, 10% Glycerol, and water) supplemented with HALT Protease Inhibitor, 3 homogenization cycles run for 20 s at 6 m/s. The extracted protein lysate concentration was determined using a BCA Protein Concentration kit (Thermofisher, 23225) according to the manufacturers' recommendation. Following protein concentration determination, samples were prepared for Jess Abby & Wes Separation module (“Jess”), according to manufacturer protocol from SM-W001. The lysates were diluted to 0.5 mg/mL with 0.1× sample buffer and mixed with a fluorescent master mix to a final concentration of 0.4 mg/mL. A loading volume of 3 μL (1.2 pg total protein) per sample was then added onto the plate. The biotinylated molecular weight ladder (12-230 kDa), antibodies, and total protein detection reagents were prepared and pipetted onto the plate per protocol before placing the plate into Jess. LDLR was detected with commercial primary antibody (Abcam ab30532) at 1:25 dilution and used with matching ProteinSimple secondary antibody (Anti-rabbit HRP, ProteinSimple, 042-206) at ready to use dilution. A recombinant Mouse LDLR Protein was used as a surrogate for an assay control (R&D Systems, 2255-LD) with two QC levels at 750 ng/mL and 375 ng/mL.

[0271] Voltage was applied to induce protein migration and separation based on molecular weight, followed by detection with primary/secondary antibodies and total protein via electrochemiluminescence (ECL). The Area Under the Curve (AUC) of the LDLR signal for all samples was normalized to the AUC of a total protein AUC. LDLR signal from test article-dosed groups was then normalized against the mean LDLR signal of the vehicle-treated group.

[0272] Results are shown in FIGS. 5A-B. Compared to PBS, siRNA-LNP results in sustainable knockdown of LDLR protein through day 7.

### e) Blood Cholesterol Biomarker

[0273] Briefly, 210 μL of Reagent 1 (993-00404, FUJIFILM Wako Chemicals) and 2.4 L of sample (fresh blood collected from tail vein), calibrator (990-28011, FUJIFILM Wako Chemicals), or blank (0.9% saline) into each well (as needed) of a 96-well microplate, mixed and incubated at 37 degrees C. for 5 min following Absorbance measurement at 600 nm wavelength (microplate reader). Followed by addition of 70 L of Reagent 2 (993-00504, FUJIFILM Wako Chemicals), 5 min incubation in 37 degree c. and second Absorbance measurement at 600 nm. The LDL-c concentration in the sample was calculated by comparison of the result from Calibrator and normalized to mean PBS value of untreated animals from given timepoint.

[0274] Results are shown in FIG. 6.

### 3. Example 3: In Vivo Dose Range Study

[0275] As shown in FIG. 8, the efficacy of LDLR KD will be evaluated in 6-8 weeks old Wildtype (WT) mice for dose selection. A single dose liver tropic LDLR targeting siRNA-LNP will be administrated at the dose range between 0.1 to 25 mg/kg, and the mice will be euthanized 4-48 h post injection for sample analysis.

[0276] The level of LDL receptor (LDLR) protein in liver will be assessed via the capillary gel electrophoresis system ProteinSimple “Jess”; the mRNA expression level of LDLR in liver will be evaluated using RT-qPCR. LDL-cholesterol level in blood will be measured using Colorimetric Absorbance assay using FUJIFILM Wako Chemicals USA, Corp.

[0277] A graphical representation of the study is shown in FIG. 7.

### 4. Example 4: In Vivo Kinetic Study

[0278] An in vivo study will be conducted to examine LDLR protein knockdown kinetics. The kinetic of LDLR KD will be evaluated in 6-8 weeks old wild-type (WT) mice. A single dose of LNP with LDLR targeting cargo will be administrated at the dose selected from the dose range in vivo study, described above in Example 3, and the mice will be euthanized at 4 h to 10-day post injection for sample analysis.

[0279] The level of LDL receptor (LDLR) protein in liver will be assessed via the capillary gel electrophoresis system ProteinSimple “Jess”; the mRNA expression level of LDLR in liver will be evaluated using RT-qPCR. LDL-cholesterol level in blood will be measured using Colorimetric Absorbance assay using FUJIFILM Wako Chemicals USA, Corp.

[0280] A graphical representation of the study is shown in FIG. 8.

### 5. Example 5: Proof-of-Concept Study

[0281] Briefly, wild-type (WT) mice will be dosed with a liver tropic LNP with cargo targeting LDLR, dose and ROA determined from the dose range in vivo study, described above in Example 3, followed up by administration of therapeutic LNP at a time point based on the most efficient LDLR knock down time determined from the in vivo kinetic study, described above in Example 4.

[0282] The animals will be euthanized for tissue panel collection and analysis of LDLR KD and therapeutic LNP biodistribution between 4 hours and 10 days post-dosing with therapeutic LNP. Control animals will be dosed with PBS in place of liver tropic LNP with cargo targeting LDLR and/or therapeutic LNP and sacrificed at a given time point.

[0283] A graphical representation of the study is shown in FIG. 9.

[0284] This description and exemplary embodiments should not be taken as limiting. For the purposes of this specification and appended claims, unless otherwise indicated, all numbers expressing quantities, percentages, or proportions, and other numerical values used in the specification and claims, are to be understood as being modified in all instances by the term “about,” to the extent they are not already so modified. Accordingly, unless indicated to the contrary, the numerical parameters set forth in the following specification and attached claims are approximations that may vary depending upon the desired properties sought to be obtained. At the very least, and not as an attempt to limit the application of the doctrine of equivalents to the scope of the claims, each numerical parameter should at least be construed in light of the number of reported significant digits and by applying ordinary rounding techniques.

[0285] It is noted that, as used in this specification and the appended claims, the singular forms “a,” “an,” and “the,” and any singular use of any word, include plural referents unless expressly and unequivocally limited to one referent. As used herein, the term “include” and its grammatical variants are intended to be non-limiting, such that recitation of items in a list is not to the exclusion of other like items that can be substituted or added to the listed item.

[0286] In Table 3A, the following monikers are used to describe the components of specific siRNA sequences. These bases and modifications are taken to be non-limiting. Uppercase characters (e.g., A, U, C, G) represent RNA bases. Lowercase characters (e.g., a, u, c, g) represent 2′ O-methyl RNA bases. Characters preceded by “d” (“d_”) represent DNA bases. Characters preceded by “s” (“s_”) represent phosphorothioate linkages.

TABLE 3A
Exemplary siRNA Sequences

| SEQ | | SEQ | |
|---|---|---|---|
| ID | Sense Sequence | ID | Antisense Sequence |
| NO. | (5′ to 3′) | NO. | (5′ to 3′) |
| 4300 | ccUccaAAGgcGuuagCasa | 9965 | dTUGCUAACGCCUuUGGAGGcsc |
| 4301 | ggAgugCAAgaCcaacGasa | 9966 | dTUCGUUGGUCUUgCACUCCusu |
| 4302 | acAauaGAAucUacugGusa | 9967 | dTACCAGUAGAUUcUAUUGUusg |
| 4303 | cuAacuUGUccUacgaCasa | 9968 | dTUGUCGUAGGACaAGUUAGgsg |
| 4304 | gcGguaGACugGauccAcsa | 9969 | dTGUGGAUCCAGUCUACCGCcsa |
| 4305 | cuGacaCCAagGgcguAasa | 9970 | dTUUACGCCCUUGgUGUCAGcsc |
| 4306 | gaCccaGAGccAucguAgsa | 9971 | dTCUACGAUGGCUCUGGGUCusg |
| 4307 | ggAacuGGCggCugaaGasa | 9972 | dTUCUUCAGCCGCcAGUUCCusc |
| 4308 | cuCgugACAuuCgguaCusa | 9973 | dTAGUACCGAAUGuCACGAGusc |
| 4309 | ggAuacACGcaUgguuUcsa | 9974 | dTGAAACCAUGCGuGUAUCCcsu |

TABLE 3B
Exemplary siRNA Sequences

| SEQ ID | | SEQ ID | |
|---|---|---|---|
| NO. | antisense_5to3_rna | NO. | antisense_5to3_dna |
| 4310 | AAAAAAUCCCCACUAUCUGUA | 9975 | AAAAAATCCCCACTATCTGTA |
| 4311 | AAAAACCUUCUAUACAGUGGU | 9976 | AAAAACCTTCTATACAGTGGT |
| 4312 | AAAAAGCGUUGCACACAGUCC | 9977 | AAAAAGCGTTGCACACAGTCC |
| 4313 | AAAAAGUGACACCCAUCUCCC | 9978 | AAAAAGTGACACCCATCTCCC |
| 4314 | AAAAAUAAAUAGAUUUUAUAU | 9979 | AAAAATAAATAGATTTTATAT |
| 4315 | AAAAAUCCCCACUAUCUGUAC | 9980 | AAAAATCCCCACTATCTGTAC |
| 4316 | AAAACAAAGCUCUGGCAGGCA | 9981 | AAAACAAAGCTCTGGCAGGCA |
| 4317 | AAAACAAGGCCGGCGAGGUCU | 9982 | AAAACAAGGCCGGCGAGGTCT |
| 4318 | AAAACAGUGCAAAAUAAUAAC | 9983 | AAAACAGTGCAAAATAATAAC |
| 4319 | AAAACCUUCUAUACAGUGGUU | 9984 | AAAACCTTCTATACAGTGGTT |
| 4320 | AAAACUUCCUGGAGAGAAAUG | 9985 | AAAACTTCCTGGAGAGAAATG |
| 4321 | AAAAGCGUUGCACACAGUCCA | 9986 | AAAAGCGTTGCACACAGTCCA |
| 4322 | AAAAGUGACACCCAUCUCCCA | 9987 | AAAAGTGACACCCATCTCCCA |
| 4323 | AAAAUAAAUAGAUUUUAUAUA | 9988 | AAAATAAATAGATTTTATATA |
| 4324 | AAAAUAAUAACACAAAUGCCA | 9989 | AAAATAATAACACAAATGCCA |
| 4325 | AAAAUACUUUGUCCUCAAAGA | 9990 | AAAATACTTTGTCCTCAAAGA |
| 4326 | AAAAUCCCAACCCAAGCCAUU | 9991 | AAAATCCCAACCCAAGCCATT |
| 4327 | AAAAUCCCCACUAUCUGUACA | 9992 | AAAATCCCCACTATCTGTACA |
| 4328 | AAAAUGGCUUCGUUGAUGAUA | 9993 | AAAATGGCTTCGTTGATGATA |
| 4329 | AAACAAAGCUCUGGCAGGCAA | 9994 | AAACAAAGCTCTGGCAGGCAA |
| 4330 | AAACAAGGCCGGCGAGGUCUC | 9995 | AAACAAGGCCGGCGAGGTCTC |
| 4331 | AAACACAUACCCAUCAACGAC | 9996 | AAACACATACCCATCAACGAC |
| 4332 | AAACACGUUGACUCCUGAGUU | 9997 | AAACACGTTGACTCCTGAGTT |
| 4333 | AAACAGUGCAAAAUAAUAACA | 9998 | AAACAGTGCAAAATAATAACA |
| 4334 | AAACAUAACAAAAAAUCCCCA | 9999 | AAACATAACAAAAAATCCCCA |
| 4335 | AAACCAAAAUCCCAACCCAAG | 10000 | AAACCAAAATCCCAACCCAAG |
| 4336 | AAACCAGAAAGGCUUAUCACG | 10001 | AAACCAGAAAGGCTTATCACG |
| 4337 | AAACCAUCCUCCCACCUCAGC | 10002 | AAACCATCCTCCCACCTCAGC |
| 4338 | AAACCCACCUCGAAAGACACU | 10003 | AAACCCACCTCGAAAGACACT |
| 4339 | AAACCCUGGCUUCCCGCGAUU | 10004 | AAACCCTGGCTTCCCGCGATT |
| 4340 | AAACCGGGGACUUCGCCAGGA | 10005 | AAACCGGGGACTTCGCCAGGA |
| 4341 | AAACCUUCUAUACAGUGGUUU | 10006 | AAACCTTCTATACAGTGGTTT |
| 4342 | AAACGAUCCAGACUGGAGGAU | 10007 | AAACGATCCAGACTGGAGGAT |
| 4343 | AAACUCAAAACUUCCUGGAGA | 10008 | AAACTCAAAACTTCCTGGAGA |
| 4344 | AAACUCGUCCUGGGAGCACGU | 10009 | AAACTCGTCCTGGGAGCACGT |
| 4345 | AAACUUCCUGGAGAGAAAUGG | 10010 | AAACTTCCTGGAGAGAAATGG |
| 4346 | AAACUUGGGCGAGUGGGGGUU | 10011 | AAACTTGGGCGAGTGGGGGTT |
| 4347 | AAAGAACCUGAAGUCCCGUCA | 10012 | AAAGAACCTGAAGTCCCGTCA |
| 4348 | AAAGAAGAGGCAUUUCAGAGG | 10013 | AAAGAAGAGGCATTTCAGAGG |
| 4349 | AAAGACACUGGGUGGGUCAUG | 10014 | AAAGACACTGGGTGGGTCATG |
| 4350 | AAAGACCCCUACAGCGCUGCG | 10015 | AAAGACCCCTACAGCGCTGCG |
| 4351 | AAAGACGACAAUGGCAGUUCU | 10016 | AAAGACGACAATGGCAGTTCT |
| 4352 | AAAGACGGCCAAGGAGAAGGG | 10017 | AAAGACGGCCAAGGAGAAGGG |
| 4353 | AAAGCAGUGGCAUAAUCAUAG | 10018 | AAAGCAGTGGCATAATCATAG |
| 4354 | AAAGCCACUUGCUUCUCUGGG | 10019 | AAAGCCACTTGCTTCTCTGGG |
| 4355 | AAAGCGUUGCACACAGUCCAG | 10020 | AAAGCGTTGCACACAGTCCAG |
| 4356 | AAAGCUCUGGCAGGCAAUGCU | 10021 | AAAGCTCTGGCAGGCAATGCT |
| 4357 | AAAGGAAGAAACCAAAAUCCC | 10022 | AAAGGAAGAAACCAAAATCCC |
| 4358 | AAAGGAAGACGAGGAGCACGA | 10023 | AAAGGAAGACGAGGAGCACGA |
| 4359 | AAAGGAAGACGAGGAGCACUG | 10024 | AAAGGAAGACGAGGAGCACTG |
| 4360 | AAAGGCUAACCUGGCUGUCUA | 10025 | AAAGGCTAACCTGGCTGTCTA |
| 4361 | AAAGGCUUAUCACGGUUCCCU | 10026 | AAAGGCTTATCACGGTTCCCT |
| 4362 | AAAGUGACACCCAUCUCCCAG | 10027 | AAAGTGACACCCATCTCCCAG |
| 4363 | AAAGUGCAAACAUAACAAAAA | 10028 | AAAGTGCAAACATAACAAAAA |
| 4364 | AAAGUGCAAGGAGACCACGGG | 10029 | AAAGTGCAAGGAGACCACGGG |
| 4365 | AAAGUGCUGGGAUUACAGGCG | 10030 | AAAGTGCTGGGATTACAGGCG |
| 4366 | AAAGUUGAUGCUGUUGAUGUU | 10031 | AAAGTTGATGCTGTTGATGTT |
| 4367 | AAAUAAAUAGAUUUUAUAUAU | 10032 | AAATAAATAGATTTTATATAT |
| 4368 | AAAUAAUAACACAAAUGCCAA | 10033 | AAATAATAACACAAATGCCAA |
| 4369 | AAAUAAUCUUUGUACAUAAAG | 10034 | AAATAATCTTTGTACATAAAG |
| 4370 | AAAUACAGCAACCAGGGUUUG | 10035 | AAATACAGCAACCAGGGTTTG |
| 4371 | AAAUACUUUGUCCUCAAAGAC | 10036 | AAATACTTTGTCCTCAAAGAC |
| 4372 | AAAUAGAUUUUAUAUAUAUGU | 10037 | AAATAGATTTTATATATATGT |
| 4373 | AAAUAGGGUCUUCAUCUGUUG | 10038 | AAATAGGGTCTTCATCTGTTG |
| 4374 | AAAUAUAUAAAACAAAGCUCU | 10039 | AAATATATAAAACAAAGCTCT |
| 4375 | AAAUAUUAAGGGUGACCAGUG | 10040 | AAATATTAAGGGTGACCAGTG |
| 4376 | AAAUCCCAACCCAAGCCAUUG | 10041 | AAATCCCAACCCAAGCCATTG |
| 4377 | AAAUCCCCACUAUCUGUACAG | 10042 | AAATCCCCACTATCTGTACAG |
| 4378 | AAAUGCCAAAUGUACACAGUG | 10043 | AAATGCCAAATGTACACAGTG |
| 4379 | AAAUGCCUGAGCUCAAACCAU | 10044 | AAATGCCTGAGCTCAAACCAT |
| 4380 | AAAUGGAGGUGUCAUCCUGGU | 10045 | AAATGGAGGTGTCATCCTGGT |
| 4381 | AAAUGGCUUCGUUGAUGAUAU | 10046 | AAATGGCTTCGTTGATGATAT |
| 4382 | AAAUGUACACAGUGUACAACU | 10047 | AAATGTACACAGTGTACAACT |
| 4383 | AAAUGUGGACCUCAUCCUCUG | 10048 | AAATGTGGACCTCATCCTCTG |
| 4384 | AAAUUCAUUUUUUAAGAGAUG | 10049 | AAATTCATTTTTTAAGAGATG |
| 4385 | AAAUUUAAUUGAUCACAGUAA | 10050 | AAATTTAATTGATCACAGTAA |
| 4386 | AACAAAAAAUCCCCACUAUCU | 10051 | AACAAAAAATCCCCACTATCT |
| 4387 | AACAAAGCUCUGGCAGGCAAU | 10052 | AACAAAGCTCTGGCAGGCAAT |
| 4388 | AACAAAUACAGCAACCAGGGU | 10053 | AACAAATACAGCAACCAGGGT |
| 4389 | AACAAGGCCGGCGAGGUCUCA | 10054 | AACAAGGCCGGCGAGGTCTCA |
| 4390 | AACAAGUUGACAUCGGAACCU | 10055 | AACAAGTTGACATCGGAACCT |
| 4391 | AACACAAAUGCCAAAUGUACA | 10056 | AACACAAATGCCAAATGTACA |
| 4392 | AACACACACGACAGAAAACAG | 10057 | AACACACACGACAGAAAACAG |
| 4393 | AACACAUACCCAUCAACGACA | 10058 | AACACATACCCATCAACGACA |
| 4394 | AACACGGCGAUUUCAGAAAGA | 10059 | AACACGGCGATTTCAGAAAGA |
| 4395 | AACACGUAAAGACCCCUACAG | 10060 | AACACGTAAAGACCCCTACAG |
| 4396 | AACACGUUGACUCCUGAGUUU | 10061 | AACACGTTGACTCCTGAGTTT |
| 4397 | AACAGAGACAGUGCCCAGGAC | 10062 | AACAGAGACAGTGCCCAGGAC |
| 4398 | AACAGCCGCCGUUGUUGUCCA | 10063 | AACAGCCGCCGTTGTTGTCCA |
| 4399 | AACAGGAUCCACCACGAUGGC | 10064 | AACAGGATCCACCACGATGGC |
| 4400 | AACAGGUCGGGUGGUUGUGUG | 10065 | AACAGGTCGGGTGGTTGTGTG |
| 4401 | AACAGUAACACGGCGAUUUCA | 10066 | AACAGTAACACGGCGATTTCA |
| 4402 | AACAGUGCAAAAUAAUAACAC | 10067 | AACAGTGCAAAATAATAACAC |
| 4403 | AACAGUUUCAACCAAUAUACA | 10068 | AACAGTTTCAACCAATATACA |
| 4404 | AACAUAACAAAAAAUCCCCAC | 10069 | AACATAACAAAAAATCCCCAC |
| 4405 | AACCAAAAUCCCAACCCAAGC | 10070 | AACCAAAATCCCAACCCAAGC |
| 4406 | AACCAAUAUACAAAGUGCAAA | 10071 | AACCAATATACAAAGTGCAAA |
| 4407 | AACCAGAAAGGCUUAUCACGG | 10072 | AACCAGAAAGGCTTATCACGG |
| 4408 | AACCAGGGUUUGCAAAAAUAA | 10073 | AACCAGGGTTTGCAAAAATAA |
| 4409 | AACCAUAUCCUCUGGGGACAG | 10074 | AACCATATCCTCTGGGGACAG |
| 4410 | AACCAUCCUCCCACCUCAGCC | 10075 | AACCATCCTCCCACCTCAGCC |
| 4411 | AACCCAAGCCAUUGCAUGGGC | 10076 | AACCCAAGCCATTGCATGGGC |
| 4412 | AACCCACCUCGAAAGACACUG | 10077 | AACCCACCTCGAAAGACACTG |
| 4413 | AACCCAGUAGAGGCGGCCACU | 10078 | AACCCAGTAGAGGCGGCCACT |
| 4414 | AACCCCCUACACAGGGCCCCG | 10079 | AACCCCCTACACAGGGCCCCG |
| 4415 | AACCCUGGCUUCCCGCGAUUG | 10080 | AACCCTGGCTTCCCGCGATTG |
| 4416 | AACCGAGGCCUUGAGGGUGGC | 10081 | AACCGAGGCCTTGAGGGTGGC |
| 4417 | AACCGCGGAGGAACGCCAGGC | 10082 | AACCGCGGAGGAACGCCAGGC |
| 4418 | AACCGGGGACUUCGCCAGGAG | 10083 | AACCGGGGACTTCGCCAGGAG |
| 4419 | AACCGGGUGUCUCAGGCACUU | 10084 | AACCGGGTGTCTCAGGCACTT |
| 4420 | AACCUCCACCUCCUGGGCUCA | 10085 | AACCTCCACCTCCTGGGCTCA |
| 4421 | AACCUCGUAAGGAACCGAGGC | 10086 | AACCTCGTAAGGAACCGAGGC |
| 4422 | AACCUGAAGUCCCGUCAAACG | 10087 | AACCTGAAGTCCCGTCAAACG |
| 4423 | AACCUGCCCCUCUCUGUCCCC | 10088 | AACCTGCCCCTCTCTGTCCCC |
| 4424 | AACCUGGCUGUCUAGCAAGGC | 10089 | AACCTGGCTGTCTAGCAAGGC |
| 4425 | AACCUGUGAGGCGGUUGGCAC | 10090 | AACCTGTGAGGCGGTTGGCAC |
| 4426 | AACCUUCUAUACAGUGGUUUA | 10091 | AACCTTCTATACAGTGGTTTA |
| 4427 | AACGACAAGAUUGGGGAAGUG | 10092 | AACGACAAGATTGGGGAAGTG |
| 4428 | AACGAUCCAGACUGGAGGAUU | 10093 | AACGATCCAGACTGGAGGATT |
| 4429 | AACGCAGCCAACUUCAUCGCU | 10094 | AACGCAGCCAACTTCATCGCT |
| 4430 | AACGGAGGGCGACUCGUGUAU | 10095 | AACGGAGGGCGACTCGTGTAT |
| 4431 | AACGGGGACAUCAUUCUCCCA | 10096 | AACGGGGACATCATTCTCCCA |
| 4432 | AACGUCGCCCAGAGCUUGGUG | 10097 | AACGTCGCCCAGAGCTTGGTG |
| 4433 | AACGUUUCAACCUCGUAAGGA | 10098 | AACGTTTCAACCTCGTAAGGA |
| 4434 | AACGUUUUCCUCUUCACGCCC | 10099 | AACGTTTTCCTCTTCACGCCC |
| 4435 | AACUCAAAACUUCCUGGAGAG | 10100 | AACTCAAAACTTCCTGGAGAG |
| 4436 | AACUCAAGUGAUCCAGCUCAG | 10101 | AACTCAAGTGATCCAGCTCAG |
| 4437 | AACUCCUGAACUCAAGUGAUC | 10102 | AACTCCTGAACTCAAGTGATC |
| 4438 | AACUCGAAGGCCGAGCAGGGG | 10103 | AACTCGAAGGCCGAGCAGGGG |
| 4439 | AACUCGUCCUGGGAGCACGUC | 10104 | AACTCGTCCTGGGAGCACGTC |
| 4440 | AACUCGUUUCUUUCGCAUCUG | 10105 | AACTCGTTTCTTTCGCATCTG |
| 4441 | AACUCUGAACUGAGAAAGUGC | 10106 | AACTCTGAACTGAGAAAGTGC |
| 4442 | AACUGAGAAAGUGCAAGGAGA | 10107 | AACTGAGAAAGTGCAAGGAGA |
| 4443 | AACUGAGGAAUGCAGCGGUUG | 10108 | AACTGAGGAATGCAGCGGTTG |
| 4444 | AACUGCCGAGAGAUGCACUUC | 10109 | AACTGCCGAGAGATGCACTTC |
| 4445 | AACUUCAUCGCUCAUGUCCUU | 10110 | AACTTCATCGCTCATGTCCTT |
| 4446 | AACUUCCUGGAGAGAAAUGGA | 10111 | AACTTCCTGGAGAGAAATGGA |
| 4447 | AACUUGAUCGGGGCUGGUGGG | 10112 | AACTTGATCGGGGCTGGTGGG |
| 4448 | AACUUGGGCGAGUGGGGGUUG | 10113 | AACTTGGGCGAGTGGGGGTTG |
| 4449 | AACUUGUUGGGUCCCUCGCAG | 10114 | AACTTGTTGGGTCCCTCGCAG |
| 4450 | AACUUUUUGGUUUUUGUAGAG | 10115 | AACTTTTTGGTTTTTGTAGAG |
| 4451 | AAGAAACCAAAAUCCCAACCC | 10116 | AAGAAACCAAAATCCCAACCC |
| 4452 | AAGAAAUUUAAUUGAUCACAG | 10117 | AAGAAATTTAATTGATCACAG |
| 4453 | AAGAACCUGAAGUCCCGUCAA | 10118 | AAGAACCTGAAGTCCCGTCAA |
| 4454 | AAGAAGAGGCAUUUCAGAGGC | 10119 | AAGAAGAGGCATTTCAGAGGC |
| 4455 | AAGAAGAGGUAGGCGAUGGAG | 10120 | AAGAAGAGGTAGGCGATGGAG |
| 4456 | AAGACACUGGGUGGGUCAUGA | 10121 | AAGACACTGGGTGGGTCATGA |
| 4457 | AAGACAUUCAGGCUACAAAAA | 10122 | AAGACATTCAGGCTACAAAAA |
| 4458 | AAGACCCCCAGGCAAAGGAAG | 10123 | AAGACCCCCAGGCAAAGGAAG |
| 4459 | AAGACCCCUACAGCGCUGCGG | 10124 | AAGACCCCTACAGCGCTGCGG |
| 4460 | AAGACGACAAUGGCAGUUCUC | 10125 | AAGACGACAATGGCAGTTCTC |
| 4461 | AAGACGAGGAGCACGAUGGGG | 10126 | AAGACGAGGAGCACGATGGGG |
| 4462 | AAGACGAGGAGCACUGUAGGG | 10127 | AAGACGAGGAGCACTGTAGGG |
| 4463 | AAGACGGCCAAGGAGAAGGGG | 10128 | AAGACGGCCAAGGAGAAGGGG |
| 4464 | AAGAGAACCAUAUCCUCUGGG | 10129 | AAGAGAACCATATCCTCTGGG |
| 4465 | AAGAGACGCCGUGGGCUCUGU | 10130 | AAGAGACGCCGTGGGCTCTGT |
| 4466 | AAGAGAUGGGGUCUUACUAUG | 10131 | AAGAGATGGGGTCTTACTATG |
| 4467 | AAGAGGCAUUUCAGAGGCAAU | 10132 | AAGAGGCATTTCAGAGGCAAT |
| 4468 | AAGAGGUAAACACGUUGACUC | 10133 | AAGAGGTAAACACGTTGACTC |
| 4469 | AAGAGGUAGGCGAUGGAGCCC | 10134 | AAGAGGTAGGCGATGGAGCCC |
| 4470 | AAGAUCUCGGCUGCAGACCAA | 10135 | AAGATCTCGGCTGCAGACCAA |
| 4471 | AAGAUGGUCUUCCGGUUGCCC | 10136 | AAGATGGTCTTCCGGTTGCCC |
| 4472 | AAGAUUGGGGAAGUGAAUGGC | 10137 | AAGATTGGGGAAGTGAATGGC |
| 4473 | AAGCACGUCUCCUGGGACUCA | 10138 | AAGCACGTCTCCTGGGACTCA |
| 4474 | AAGCACUAGGUGGGCGGACAU | 10139 | AAGCACTAGGTGGGCGGACAT |
| 4475 | AAGCAGUCCCGGUCUGAGUCA | 10140 | AAGCAGTCCCGGTCTGAGTCA |
| 4476 | AAGCAGUGGCAUAAUCAUAGC | 10141 | AAGCAGTGGCATAATCATAGC |
| 4477 | AAGCAUUCGUUGGUCCCGCAC | 10142 | AAGCATTCGTTGGTCCCGCAC |
| 4478 | AAGCCACUCAUACAUACAACG | 10143 | AAGCCACTCATACATACAACG |
| 4479 | AAGCCACUUGCUUCUCUGGGC | 10144 | AAGCCACTTGCTTCTCTGGGC |
| 4480 | AAGCCAUGAACAGGAUCCACC | 10145 | AAGCCATGAACAGGATCCACC |
| 4481 | AAGCCAUUGCAUGGGCACUGU | 10146 | AAGCCATTGCATGGGCACTGT |
| 4482 | AAGCCGCCAGUUCUUCCAUAG | 10147 | AAGCCGCCAGTTCTTCCATAG |
| 4483 | AAGCCGUCGGGGCACAGGCAC | 10148 | AAGCCGTCGGGGCACAGGCAC |
| 4484 | AAGCCUGUUCUGCCUCCCAGA | 10149 | AAGCCTGTTCTGCCTCCCAGA |
| 4485 | AAGCCUUCCUCACACUGGCAC | 10150 | AAGCCTTCCTCACACTGGCAC |
| 4486 | AAGCGUUGCACACAGUCCAGU | 10151 | AAGCGTTGCACACAGTCCAGT |
| 4487 | AAGCUCCGCUUCCCGGGUUCA | 10152 | AAGCTCCGCTTCCCGGGTTCA |
| 4488 | AAGCUCUGGCAGGCAAUGCUU | 10153 | AAGCTCTGGCAGGCAATGCTT |
| 4489 | AAGCUGGCGGGACCACAGGUG | 10154 | AAGCTGGCGGGACCACAGGTG |
| 4490 | AAGCUGGGUGCUGCAGAUCAU | 10155 | AAGCTGGGTGCTGCAGATCAT |
| 4491 | AAGGAACCGAGGCCUUGAGGG | 10156 | AAGGAACCGAGGCCTTGAGGG |
| 4492 | AAGGAAGAAACCAAAAUCCCA | 10157 | AAGGAAGAAACCAAAATCCCA |
| 4493 | AAGGAAGACCCCCAGGCAAAG | 10158 | AAGGAAGACCCCCAGGCAAAG |
| 4494 | AAGGAAGACGAGGAGCACGAU | 10159 | AAGGAAGACGAGGAGCACGAT |
| 4495 | AAGGAAGACGAGGAGCACUGU | 10160 | AAGGAAGACGAGGAGCACTGT |
| 4496 | AAGGAAGGUACAAACCCACCU | 10161 | AAGGAAGGTACAAACCCACCT |
| 4497 | AAGGAGAAGGGGUGGGCCAGC | 10162 | AAGGAGAAGGGGTGGGCCAGC |
| 4498 | AAGGAGACCACGGGAAUGGAA | 10163 | AAGGAGACCACGGGAATGGAA |
| 4499 | AAGGAGGGGGGGGGAGAUUCU | 10164 | AAGGAGGGGGGGGGAGATTCT |
| 4500 | AAGGCCGAGCAGGGGCUACUG | 10165 | AAGGCCGAGCAGGGGCTACTG |
| 4501 | AAGGCCGGCGAGGUCUCAGGA | 10166 | AAGGCCGGCGAGGTCTCAGGA |
| 4502 | AAGGCGACGGUCCAGCGCAAU | 10167 | AAGGCGACGGTCCAGCGCAAT |
| 4503 | AAGGCUAACCUGGCUGUCUAG | 10168 | AAGGCTAACCTGGCTGTCTAG |
| 4504 | AAGGCUUAUCACGGUUCCCUG | 10169 | AAGGCTTATCACGGTTCCCTG |
| 4505 | AAGGCUUGCAUAGAAGAGGUA | 10170 | AAGGCTTGCATAGAAGAGGTA |
| 4506 | AAGGGGUGGGCCAGCCUCUUU | 10171 | AAGGGGTGGGCCAGCCTCTTT |
| 4507 | AAGGGUGACCAGUGACUCAGG | 10172 | AAGGGTGACCAGTGACTCAGG |
| 4508 | AAGGGUUCUGGGCAGGGACGG | 10173 | AAGGGTTCTGGGCAGGGACGG |
| 4509 | AAGGUAACCGGGUGUCUCAGG | 10174 | AAGGTAACCGGGTGTCTCAGG |
| 4510 | AAGGUACAAACCCACCUCGAA | 10175 | AAGGTACAAACCCACCTCGAA |
| 4511 | AAGGUCAUUGCAGACGUGGGA | 10176 | AAGGTCATTGCAGACGTGGGA |
| 4512 | AAGGUGGGGACGGAGGUGUCG | 10177 | AAGGTGGGGACGGAGGTGTCG |
| 4513 | AAGUAGCUGGGAUCACAGGCA | 10178 | AAGTAGCTGGGATCACAGGCA |
| 4514 | AAGUCCCCGGAUUUGCAGGUG | 10179 | AAGTCCCCGGATTTGCAGGTG |
| 4515 | AAGUCCCGGUCAACCUGCCCC | 10180 | AAGTCCCGGTCAACCTGCCCC |
| 4516 | AAGUCCCGUCAAACGAUCCAG | 10181 | AAGTCCCGTCAAACGATCCAG |
| 4517 | AAGUGAAUGGCUUGGAGGCAU | 10182 | AAGTGAATGGCTTGGAGGCAT |
| 4518 | AAGUGACACCCAUCUCCCAGA | 10183 | AAGTGACACCCATCTCCCAGA |
| 4519 | AAGUGAUAACAGUUUCAACCA | 10184 | AAGTGATAACAGTTTCAACCA |
| 4520 | AAGUGAUCCAGCUCAGCCUCC | 10185 | AAGTGATCCAGCTCAGCCTCC |
| 4521 | AAGUGCAAACAUAACAAAAAA | 10186 | AAGTGCAAACATAACAAAAAA |
| 4522 | AAGUGCAAGGAGACCACGGGA | 10187 | AAGTGCAAGGAGACCACGGGA |
| 4523 | AAGUGCUGGGAUUACAGGCGU | 10188 | AAGTGCTGGGATTACAGGCGT |
| 4524 | AAGUGGAAGCACUAGGUGGGC | 10189 | AAGTGGAAGCACTAGGTGGGC |
| 4525 | AAGUGGCAUCAUUUGGUGAAU | 10190 | AAGTGGCATCATTTGGTGAAT |
| 4526 | AAGUGGGUAGGGGUCGGGAGG | 10191 | AAGTGGGTAGGGGTCGGGAGG |
| 4527 | AAGUUGACAUCGGAACCUGUG | 10192 | AAGTTGACATCGGAACCTGTG |
| 4528 | AAGUUGAUGCUGUUGAUGUUC | 10193 | AAGTTGATGCTGTTGATGTTC |
| 4529 | AAGUUUGGAGUCAACCCAGUA | 10194 | AAGTTTGGAGTCAACCCAGTA |
| 4530 | AAUAAAACAAGGCCGGCGAGG | 10195 | AATAAAACAAGGCCGGCGAGG |
| 4531 | AAUAAAUAGAUUUUAUAUAUA | 10196 | AATAAATAGATTTTATATATA |
| 4532 | AAUAAAUAUAUAAAACAAAGC | 10197 | AATAAATATATAAAACAAAGC |
| 4533 | AAUAAAUAUUAAGGGUGACCA | 10198 | AATAAATATTAAGGGTGACCA |
| 4534 | AAUAACACAAAUGCCAAAUGU | 10199 | AATAACACAAATGCCAAATGT |
| 4535 | AAUAACCCCCUACACAGGGCC | 10200 | AATAACCCCCTACACAGGGCC |
| 4536 | AAUAACGUUUUCCUCUUCACG | 10201 | AATAACGTTTTCCTCTTCACG |
| 4537 | AAUAAUAACACAAAUGCCAAA | 10202 | AATAATAACACAAATGCCAAA |
| 4538 | AAUAAUCUUUGUACAUAAAGA | 10203 | AATAATCTTTGTACATAAAGA |
| 4539 | AAUACAGCAACCAGGGUUUGC | 10204 | AATACAGCAACCAGGGTTTGC |
| 4540 | AAUACUUUGUCCUCAAAGACG | 10205 | AATACTTTGTCCTCAAAGACG |
| 4541 | AAUAGAUUUUAUAUAUAUGUG | 10206 | AATAGATTTTATATATATGTG |
| 4542 | AAUAGGGUCUUCAUCUGUUGC | 10207 | AATAGGGTCTTCATCTGTTGC |
| 4543 | AAUAGUCACUGAACAAAUACA | 10208 | AATAGTCACTGAACAAATACA |
| 4544 | AAUAUACAAAGUGCAAACAUA | 10209 | AATATACAAAGTGCAAACATA |
| 4545 | AAUAUAUAAAACAAAGCUCUG | 10210 | AATATATAAAACAAAGCTCTG |
| 4546 | AAUAUUAAGGGUGACCAGUGA | 10211 | AATATTAAGGGTGACCAGTGA |
| 4547 | AAUCAUAGCUCACGACAGCCU | 10212 | AATCATAGCTCACGACAGCCT |
| 4548 | AAUCCCAACCCAAGCCAUUGC | 10213 | AATCCCAACCCAAGCCATTGC |
| 4549 | AAUCCCCACUAUCUGUACAGG | 10214 | AATCCCCACTATCTGTACAGG |
| 4550 | AAUCCCUUGUGACAUCUUCAC | 10215 | AATCCCTTGTGACATCTTCAC |
| 4551 | AAUCCCUUUCCUGGCUUAAGG | 10216 | AATCCCTTTCCTGGCTTAAGG |
| 4552 | AAUCUCGGCUCACUGCAAGCU | 10217 | AATCTCGGCTCACTGCAAGCT |
| 4553 | AAUCUUUGUACAUAAAGAAGA | 10218 | AATCTTTGTACATAAAGAAGA |
| 4554 | AAUGAGUUUGGUCUCGGUGCC | 10219 | AATGAGTTTGGTCTCGGTGCC |
| 4555 | AAUGCAGCGGUUGACACGGCC | 10220 | AATGCAGCGGTTGACACGGCC |
| 4556 | AAUGCCAAAUGUACACAGUGU | 10221 | AATGCCAAATGTACACAGTGT |
| 4557 | AAUGCCUGAGCUCAAACCAUC | 10222 | AATGCCTGAGCTCAAACCATC |
| 4558 | AAUGCUUUGGUCUUCUCUGUC | 10223 | AATGCTTTGGTCTTCTCTGTC |
| 4559 | AAUGGAAGUGGGUAGGGGUCG | 10224 | AATGGAAGTGGGTAGGGGTCG |
| 4560 | AAUGGACAGAGCCCUCACGCU | 10225 | AATGGACAGAGCCCTCACGCT |
| 4561 | AAUGGAGGUGUCAUCCUGGUC | 10226 | AATGGAGGTGTCATCCTGGTC |
| 4562 | AAUGGCAGUUCUCGAUAUUCA | 10227 | AATGGCAGTTCTCGATATTCA |
| 4563 | AAUGGCUUCGUUGAUGAUAUC | 10228 | AATGGCTTCGTTGATGATATC |
| 4564 | AAUGGCUUGGAGGCAUUUGCA | 10229 | AATGGCTTGGAGGCATTTGCA |
| 4565 | AAUGUACACAGUGUACAACUC | 10230 | AATGTACACAGTGTACAACTC |
| 4566 | AAUGUGGACCUCAUCCUCUGU | 10231 | AATGTGGACCTCATCCTCTGT |
| 4567 | AAUGUUUUCAGUCACCAGCGA | 10232 | AATGTTTTCAGTCACCAGCGA |
| 4568 | AAUUCAUUUUUUAAGAGAUGG | 10233 | AATTCATTTTTTAAGAGATGG |
| 4569 | AAUUCGUCAGGGCGACAGGUG | 10234 | AATTCGTCAGGGCGACAGGTG |
| 4570 | AAUUGAUCACAGUAAGACAUU | 10235 | AATTGATCACAGTAAGACATT |
| 4571 | AAUUGCCAAUCCCUUGUGACA | 10236 | AATTGCCAATCCCTTGTGACA |
| 4572 | AAUUUAAUUGAUCACAGUAAG | 10237 | AATTTAATTGATCACAGTAAG |
| 4573 | AAUUUCCAGCCCCAGGGCCCC | 10238 | AATTTCCAGCCCCAGGGCCCC |
| 4574 | AAUUUUUUGUAUUUUUAGUAG | 10239 | AATTTTTTGTATTTTTAGTAG |
| 4575 | ACAAAAAAUCCCCACUAUCUG | 10240 | ACAAAAAATCCCCACTATCTG |
| 4576 | ACAAAAACCUUCUAUACAGUG | 10241 | ACAAAAACCTTCTATACAGTG |
| 4577 | ACAAACCCACCUCGAAAGACA | 10242 | ACAAACCCACCTCGAAAGACA |
| 4578 | ACAAAGCUCUGGCAGGCAAUG | 10243 | ACAAAGCTCTGGCAGGCAATG |
| 4579 | ACAAAGUGCAAACAUAACAAA | 10244 | ACAAAGTGCAAACATAACAAA |
| 4580 | ACAAAUACAGCAACCAGGGUU | 10245 | ACAAATACAGCAACCAGGGTT |
| 4581 | ACAAAUGCCAAAUGUACACAG | 10246 | ACAAATGCCAAATGTACACAG |
| 4582 | ACAACGGGGACAUCAUUCUCC | 10247 | ACAACGGGGACATCATTCTCC |
| 4583 | ACAACUCUGAACUGAGAAAGU | 10248 | ACAACTCTGAACTGAGAAAGT |
| 4584 | ACAAGAUUGGGGAAGUGAAUG | 10249 | ACAAGATTGGGGAAGTGAATG |
| 4585 | ACAAGCACGUCUCCUGGGACU | 10250 | ACAAGCACGTCTCCTGGGACT |
| 4586 | ACAAGGCCGGCGAGGUCUCAG | 10251 | ACAAGGCCGGCGAGGTCTCAG |
| 4587 | ACAAGGUGGGGACGGAGGUGU | 10252 | ACAAGGTGGGGACGGAGGTGT |
| 4588 | ACAAGUUGACAUCGGAACCUG | 10253 | ACAAGTTGACATCGGAACCTG |
| 4589 | ACAAUGGACAGAGCCCUCACG | 10254 | ACAATGGACAGAGCCCTCACG |
| 4590 | ACAAUGGCAGUUCUCGAUAUU | 10255 | ACAATGGCAGTTCTCGATATT |
| 4591 | ACAAUUGCCAAUCCCUUGUGA | 10256 | ACAATTGCCAATCCCTTGTGA |
| 4592 | ACACAAAUGCCAAAUGUACAC | 10257 | ACACAAATGCCAAATGTACAC |
| 4593 | ACACACACGACAGAAAACAGU | 10258 | ACACACACGACAGAAAACAGT |
| 4594 | ACACACGACAGAAAACAGUGC | 10259 | ACACACGACAGAAAACAGTGC |
| 4595 | ACACAGCUGCCCCCGAGACCA | 10260 | ACACAGCTGCCCCCGAGACCA |
| 4596 | ACACAGGGCCCCGAGAAUAGU | 10261 | ACACAGGGCCCCGAGAATAGT |
| 4597 | ACACAGUCCAGUUCGUGCAAA | 10262 | ACACAGTCCAGTTCGTGCAAA |
| 4598 | ACACAGUGUACAACUCUGAAC | 10263 | ACACAGTGTACAACTCTGAAC |
| 4599 | ACACAGUGUUUUGUCCCUGGG | 10264 | ACACAGTGTTTTGTCCCTGGG |
| 4600 | ACACAUACCCAUCAACGACAA | 10265 | ACACATACCCATCAACGACAA |
| 4601 | ACACCAGUUCACUCCUCUUGG | 10266 | ACACCAGTTCACTCCTCTTGG |
| 4602 | ACACCAUUCAGGCCCCCUUUC | 10267 | ACACCATTCAGGCCCCCTTTC |
| 4603 | ACACCAUUCUCCUGCCUCAGC | 10268 | ACACCATTCTCCTGCCTCAGC |
| 4604 | ACACCCAUCUCCCAGAAGCCA | 10269 | ACACCCATCTCCCAGAAGCCA |
| 4605 | ACACCUGGGUGCAGGCCACGU | 10270 | ACACCTGGGTGCAGGCCACGT |
| 4606 | ACACGACAGAAAACAGUGCAA | 10271 | ACACGACAGAAAACAGTGCAA |
| 4607 | ACACGGCCCCCACAGCUGAAG | 10272 | ACACGGCCCCCACAGCTGAAG |
| 4608 | ACACGGCGAUUUCAGAAAGAA | 10273 | ACACGGCGATTTCAGAAAGAA |
| 4609 | ACACGGGCUUUCCCUGGCCUG | 10274 | ACACGGGCTTTCCCTGGCCTG |
| 4610 | ACACGUAAAGACCCCUACAGC | 10275 | ACACGTAAAGACCCCTACAGC |
| 4611 | ACACGUUGACUCCUGAGUUUA | 10276 | ACACGTTGACTCCTGAGTTTA |
| 4612 | ACACUCAUCGAUAUCGCACUC | 10277 | ACACTCATCGATATCGCACTC |
| 4613 | ACACUCAUCGAUAUCUUCGCA | 10278 | ACACTCATCGATATCTTCGCA |
| 4614 | ACACUGCCGGCUGCCAUGGAU | 10279 | ACACTGCCGGCTGCCATGGAT |
| 4615 | ACACUGGCACUUGUAGCCACC | 10280 | ACACTGGCACTTGTAGCCACC |
| 4616 | ACACUGGGUGGGUCAUGAUUC | 10281 | ACACTGGGTGGGTCATGATTC |
| 4617 | ACACUUGAACUUGUUGGGUCC | 10282 | ACACTTGAACTTGTTGGGTCC |
| 4618 | ACAGAAAACAGUGCAAAAUAA | 10283 | ACAGAAAACAGTGCAAAATAA |
| 4619 | ACAGACAAGCACGUCUCCUGG | 10284 | ACAGACAAGCACGTCTCCTGG |
| 4620 | ACAGACGAACUGCCGAGAGAU | 10285 | ACAGACGAACTGCCGAGAGAT |
| 4621 | ACAGAGACAGUGCCCAGGACA | 10286 | ACAGAGACAGTGCCCAGGACA |
| 4622 | ACAGAGCACAGCGGAAACCGG | 10287 | ACAGAGCACAGCGGAAACCGG |
| 4623 | ACAGAGCCCUCACGCUACUGG | 10288 | ACAGAGCCCTCACGCTACTGG |
| 4624 | ACAGAGUCGGUCCAGUAGAUG | 10289 | ACAGAGTCGGTCCAGTAGATG |
| 4625 | ACAGAUACUGGCAGCCGCCAU | 10290 | ACAGATACTGGCAGCCGCCAT |
| 4626 | ACAGCAACCAGGGUUUGCAAA | 10291 | ACAGCAACCAGGGTTTGCAAA |
| 4627 | ACAGCCACACCUGGGUGCAGG | 10292 | ACAGCCACACCTGGGTGCAGG |
| 4628 | ACAGCCAGCCCGUCGGGGGCC | 10293 | ACAGCCAGCCCGTCGGGGGCC |
| 4629 | ACAGCCGCCGUUGUUGUCCAA | 10294 | ACAGCCGCCGTTGTTGTCCAA |
| 4630 | ACAGCCUCAAAUGCCUGAGCU | 10295 | ACAGCCTCAAATGCCTGAGCT |
| 4631 | ACAGCCUUGCAGGCCUUCGUG | 10296 | ACAGCCTTGCAGGCCTTCGTG |
| 4632 | ACAGCCUUGCUCGUCUGAGCC | 10297 | ACAGCCTTGCTCGTCTGAGCC |
| 4633 | ACAGCGCAGUUUUCCUCGUCA | 10298 | ACAGCGCAGTTTTCCTCGTCA |
| 4634 | ACAGCGCCAGCUGGAGUGGAU | 10299 | ACAGCGCCAGCTGGAGTGGAT |
| 4635 | ACAGCGCUGCGGCCACUCAUC | 10300 | ACAGCGCTGCGGCCACTCATC |
| 4636 | ACAGCGGAAACCGGGGACUUC | 10301 | ACAGCGGAAACCGGGGACTTC |
| 4637 | ACAGCUGAAGUCCCCGGAUUU | 10302 | ACAGCTGAAGTCCCCGGATTT |
| 4638 | ACAGCUGCCCCCGAGACCAGA | 10303 | ACAGCTGCCCCCGAGACCAGA |
| 4639 | ACAGCUGGGGGAUGCAGGUGG | 10304 | ACAGCTGGGGGATGCAGGTGG |
| 4640 | ACAGGAACCGCGGAGGAACGC | 10305 | ACAGGAACCGCGGAGGAACGC |
| 4641 | ACAGGACAGCCUUGCUCGUCU | 10306 | ACAGGACAGCCTTGCTCGTCT |
| 4642 | ACAGGAUCCACCACGAUGGCC | 10307 | ACAGGATCCACCACGATGGCC |
| 4643 | ACAGGCACGUGCCACCGUACC | 10308 | ACAGGCACGTGCCACCGTACC |
| 4644 | ACAGGCACUCGUAGCCGAUCU | 10309 | ACAGGCACTCGTAGCCGATCT |
| 4645 | ACAGGCGUGAGCCACUGCGCC | 10310 | ACAGGCGTGAGCCACTGCGCC |
| 4646 | ACAGGCGUGAGGCACCUGUGU | 10311 | ACAGGCGTGAGGCACCTGTGT |
| 4647 | ACAGGGACGCAUUUACGUGCU | 10312 | ACAGGGACGCATTTACGTGCT |
| 4648 | ACAGGGCAAAGGCUAACCUGG | 10313 | ACAGGGCAAAGGCTAACCTGG |
| 4649 | ACAGGGCCCCGAGAAUAGUCA | 10314 | ACAGGGCCCCGAGAATAGTCA |
| 4650 | ACAGGUCAGACCAGUAGAUUC | 10315 | ACAGGTCAGACCAGTAGATTC |
| 4651 | ACAGGUCGGGUGGUUGUGUGC | 10316 | ACAGGTCGGGTGGTTGTGTGC |
| 4652 | ACAGGUGAGCACCGGGCAGGA | 10317 | ACAGGTGAGCACCGGGCAGGA |
| 4653 | ACAGGUGCCCGCCACCACGCC | 10318 | ACAGGTGCCCGCCACCACGCC |
| 4654 | ACAGGUGGCCACAGCGCAGUU | 10319 | ACAGGTGGCCACAGCGCAGTT |
| 4655 | ACAGGUGGCCACAGGACAGCC | 10320 | ACAGGTGGCCACAGGACAGCC |
| 4656 | ACAGUAACACGGCGAUUUCAG | 10321 | ACAGTAACACGGCGATTTCAG |
| 4657 | ACAGUAAGACAUUCAGGCUAC | 10322 | ACAGTAAGACATTCAGGCTAC |
| 4658 | ACAGUAGGUUUUCAGCCAACA | 10323 | ACAGTAGGTTTTCAGCCAACA |
| 4659 | ACAGUCCAGUUCGUGCAAAUA | 10324 | ACAGTCCAGTTCGTGCAAATA |
| 4660 | ACAGUGCAAAAUAAUAACACA | 10325 | ACAGTGCAAAATAATAACACA |
| 4661 | ACAGUGCCCAGGACAGAGUCG | 10326 | ACAGTGCCCAGGACAGAGTCG |
| 4662 | ACAGUGGUUUAAAAAGUGACA | 10327 | ACAGTGGTTTAAAAAGTGACA |
| 4663 | ACAGUGUACAACUCUGAACUG | 10328 | ACAGTGTACAACTCTGAACTG |
| 4664 | ACAGUGUUUUGUCCCUGGGGA | 10329 | ACAGTGTTTTGTCCCTGGGGA |
| 4665 | ACAGUUUCAACCAAUAUACAA | 10330 | ACAGTTTCAACCAATATACAA |
| 4666 | ACAUAAAGAAGAGGCAUUUCA | 10331 | ACATAAAGAAGAGGCATTTCA |
| 4667 | ACAUAAAGACGACAAUGGCAG | 10332 | ACATAAAGACGACAATGGCAG |
| 4668 | ACAUAACAAAAAAUCCCCACU | 10333 | ACATAACAAAAAATCCCCACT |
| 4669 | ACAUACAACGGGGACAUCAUU | 10334 | ACATACAACGGGGACATCATT |
| 4670 | ACAUACCCAUCAACGACAAGA | 10335 | ACATACCCATCAACGACAAGA |
| 4671 | ACAUCAGUGCAACAGUAACAC | 10336 | ACATCAGTGCAACAGTAACAC |
| 4672 | ACAUCAUUCUCCCAAAAAGCG | 10337 | ACATCATTCTCCCAAAAAGCG |
| 4673 | ACAUCCCCUCCCCUUUCAUCU | 10338 | ACATCCCCTCCCCTTTCATCT |
| 4674 | ACAUCGAUGCUUGAGAUGGAG | 10339 | ACATCGATGCTTGAGATGGAG |
| 4675 | ACAUCGGAACCUGUGAGGCGG | 10340 | ACATCGGAACCTGTGAGGCGG |
| 4676 | ACAUCUUCACGCGGGAGUCUG | 10341 | ACATCTTCACGCGGGAGTCTG |
| 4677 | ACAUGAAGCCAUGAACAGGAU | 10342 | ACATGAAGCCATGAACAGGAT |
| 4678 | ACAUUAACGCAGCCAACUUCA | 10343 | ACATTAACGCAGCCAACTTCA |
| 4679 | ACAUUCAGGCUACAAAAACCU | 10344 | ACATTCAGGCTACAAAAACCT |
| 4680 | ACAUUGUCACUAUCUCCACCG | 10345 | ACATTGTCACTATCTCCACCG |
| 4681 | ACCAAAAUCCCAACCCAAGCC | 10346 | ACCAAAATCCCAACCCAAGCC |
| 4682 | ACCAAGGAGGGGGGGGAGAU | 10347 | ACCAAGGAGGGGCGGGGAGAT |
| 4683 | ACCAAUAUACAAAGUGCAAAC | 10348 | ACCAATATACAAAGTGCAAAC |
| 4684 | ACCACAGGUGAGCACCGGGCA | 10349 | ACCACAGGTGAGCACCGGGCA |
| 4685 | ACCACGAUGGCCCUUGGCUUG | 10350 | ACCACGATGGCCCTTGGCTTG |
| 4686 | ACCACGCCCGGCUAAUUUUUU | 10351 | ACCACGCCCGGCTAATTTTTT |
| 4687 | ACCACGGAUUCAGCCAGAUCA | 10352 | ACCACGGATTCAGCCAGATCA |
| 4688 | ACCACGGGAAUGGAAGUGGGU | 10353 | ACCACGGGAATGGAAGTGGGT |
| 4689 | ACCACGUUCCUCAGGUUGGGG | 10354 | ACCACGTTCCTCAGGTTGGGG |
| 4690 | ACCAGAAAGGCUUAUCACGGU | 10355 | ACCAGAAAGGCTTATCACGGT |
| 4691 | ACCAGAGACCCAGCUCCGUGG | 10356 | ACCAGAGACCCAGCTCCGTGG |
| 4692 | ACCAGCGAGUAGAUGUCCACA | 10357 | ACCAGCGAGTAGATGTCCACA |
| 4693 | ACCAGCUGGAAGCCGUCGGGG | 10358 | ACCAGCTGGAAGCCGTCGGGG |
| 4694 | ACCAGGCUGGUGUCCUGACAG | 10359 | ACCAGGCTGGTGTCCTGACAG |
| 4695 | ACCAGGGUUUGCAAAAAUAAA | 10360 | ACCAGGGTTTGCAAAAATAAA |
| 4696 | ACCAGUAGAUUCUAUUGCUGG | 10361 | ACCAGTAGATTCTATTGCTGG |
| 4697 | ACCAGUCCCGGCAGUCUCUAG | 10362 | ACCAGTCCCGGCAGTCTCTAG |
| 4698 | ACCAGUGACUCAGGCUCUGCC | 10363 | ACCAGTGACTCAGGCTCTGCC |
| 4699 | ACCAGUUCACUCCUCUUGGCU | 10364 | ACCAGTTCACTCCTCTTGGCT |
| 4700 | ACCAUAUCCUCUGGGGACAGU | 10365 | ACCATATCCTCTGGGGACAGT |
| 4701 | ACCAUCACAGCGCCAGCUGGA | 10366 | ACCATCACAGCGCCAGCTGGA |
| 4702 | ACCAUCCUCCCACCUCAGCCU | 10367 | ACCATCCTCCCACCTCAGCCT |
| 4703 | ACCAUCGAGGGGUAGCUGUAG | 10368 | ACCATCGAGGGGTAGCTGTAG |
| 4704 | ACCAUCUGUCUCGAGGGGUAG | 10369 | ACCATCTGTCTCGAGGGGTAG |
| 4705 | ACCAUGCAUGGUUUUUUUUUG | 10370 | ACCATGCATGGTTTTTTTTTG |
| 4706 | ACCAUUCAGGCCCCCUUUCUU | 10371 | ACCATTCAGGCCCCCTTTCTT |
| 4707 | ACCAUUCUCCUGCCUCAGCCU | 10372 | ACCATTCTCCTGCCTCAGCCT |
| 4708 | ACCCAAGCCAUUGCAUGGGCA | 10373 | ACCCAAGCCATTGCATGGGCA |
| 4709 | ACCCACCUCGAAAGACACUGG | 10374 | ACCCACCTCGAAAGACACTGG |
| 4710 | ACCCACUUGUAGGAGAUGCAU | 10375 | ACCCACTTGTAGGAGATGCAT |
| 4711 | ACCCAGCUCCGUGGCGAUGGG | 10376 | ACCCAGCTCCGTGGCGATGGG |
| 4712 | ACCCAGCUGAUUUUUAACUUU | 10377 | ACCCAGCTGATTTTTAACTTT |
| 4713 | ACCCAGUAGAGGCGGCCACUG | 10378 | ACCCAGTAGAGGCGGCCACTG |
| 4714 | ACCCAUCAACGACAAGAUUGG | 10379 | ACCCATCAACGACAAGATTGG |
| 4715 | ACCCAUCUCCCAGAAGCCACU | 10380 | ACCCATCTCCCAGAAGCCACT |
| 4716 | ACCCCCAGGCAAAGGAAGACG | 10381 | ACCCCCAGGCAAAGGAAGACG |
| 4717 | ACCCCCUACACAGGGCCCCGA | 10382 | ACCCCCTACACAGGGCCCCGA |
| 4718 | ACCCCUACAGCGCUGCGGCCA | 10383 | ACCCCTACAGCGCTGCGGCCA |
| 4719 | ACCCGCCUCGGCCUCCCAAAG | 10384 | ACCCGCCTCGGCCTCCCAAAG |
| 4720 | ACCCGGAUCACGACCUGCUGU | 10385 | ACCCGGATCACGACCTGCTGT |
| 4721 | ACCCGGGACUUGUCGUCGCCU | 10386 | ACCCGGGACTTGTCGTCGCCT |
| 4722 | ACCCUCCAGGUUCACGCAGAG | 10387 | ACCCTCCAGGTTCACGCAGAG |
| 4723 | ACCCUGGCUUCCCGCGAUUGC | 10388 | ACCCTGGCTTCCCGCGATTGC |
| 4724 | ACCGAGGCCUUGAGGGUGGCC | 10389 | ACCGAGGCCTTGAGGGTGGCC |
| 4725 | ACCGCGGAGGAACGCCAGGCC | 10390 | ACCGCGGAGGAACGCCAGGCC |
| 4726 | ACCGGGCAGGAGGCCUCGUCU | 10391 | ACCGGGCAGGAGGCCTCGTCT |
| 4727 | ACCGGGGACUUCGCCAGGAGG | 10392 | ACCGGGGACTTCGCCAGGAGG |
| 4728 | ACCGGGUGUCUCAGGCACUUA | 10393 | ACCGGGTGTCTCAGGCACTTA |
| 4729 | ACCGUACCCAGCUGAUUUUUA | 10394 | ACCGTACCCAGCTGATTTTTA |
| 4730 | ACCGUGCAUGUUUUAAACACA | 10395 | ACCGTGCATGTTTTAAACACA |
| 4731 | ACCGUGGUGAGCCCAGGGGUG | 10396 | ACCGTGGTGAGCCCAGGGGTG |
| 4732 | ACCUCAGCCUCGCCAUGCCUG | 10397 | ACCTCAGCCTCGCCATGCCTG |
| 4733 | ACCUCAUCCUCUGUGGUCUUC | 10398 | ACCTCATCCTCTGTGGTCTTC |
| 4734 | ACCUCAUGAUCCACCCGCCUC | 10399 | ACCTCATGATCCACCCGCCTC |
| 4735 | ACCUCCACCUCCUGGGCUCAG | 10400 | ACCTCCACCTCCTGGGCTCAG |
| 4736 | ACCUCCAGAACUGAGGAAUGC | 10401 | ACCTCCAGAACTGAGGAATGC |
| 4737 | ACCUCCGUGUCCAGAGCGACC | 10402 | ACCTCCGTGTCCAGAGCGACC |
| 4738 | ACCUCCUGGGCUCAGGCGAUC | 10403 | ACCTCCTGGGCTCAGGCGATC |
| 4739 | ACCUCGAAAGACACUGGGUGG | 10404 | ACCTCGAAAGACACTGGGTGG |
| 4740 | ACCUCGUAAGGAACCGAGGCC | 10405 | ACCTCGTAAGGAACCGAGGCC |
| 4741 | ACCUCGUGCCGGUUGGUGAAG | 10406 | ACCTCGTGCCGGTTGGTGAAG |
| 4742 | ACCUGAAGUCCCGUCAAACGA | 10407 | ACCTGAAGTCCCGTCAAACGA |
| 4743 | ACCUGCCCCUCUCUGUCCCCG | 10408 | ACCTGCCCCTCTCTGTCCCCG |
| 4744 | ACCUGCUGUGUCCUAGCUGGA | 10409 | ACCTGCTGTGTCCTAGCTGGA |
| 4745 | ACCUGGCUGUCUAGCAAGGCU | 10410 | ACCTGGCTGTCTAGCAAGGCT |
| 4746 | ACCUGGGUGCAGGCCACGUGU | 10411 | ACCTGGGTGCAGGCCACGTGT |
| 4747 | ACCUGUGAGGCGGUUGGCACU | 10412 | ACCTGTGAGGCGGTTGGCACT |
| 4748 | ACCUGUGUCUGGCCAAAUUCA | 10413 | ACCTGTGTCTGGCCAAATTCA |
| 4749 | ACCUUCUAUACAGUGGUUUAA | 10414 | ACCTTCTATACAGTGGTTTAA |
| 4750 | ACCUUUAGCCUGACGGUGGAU | 10415 | ACCTTTAGCCTGACGGTGGAT |
| 4751 | ACGAACUGCCGAGAGAUGCAC | 10416 | ACGAACTGCCGAGAGATGCAC |
| 4752 | ACGACAAGAUUGGGGAAGUGA | 10417 | ACGACAAGATTGGGGAAGTGA |
| 4753 | ACGACAAUGGCAGUUCUCGAU | 10418 | ACGACAATGGCAGTTCTCGAT |
| 4754 | ACGACAGAAAACAGUGCAAAA | 10419 | ACGACAGAAAACAGTGCAAAA |
| 4755 | ACGACAGCCUCAAAUGCCUGA | 10420 | ACGACAGCCTCAAATGCCTGA |
| 4756 | ACGACCUGCUGUGUCCUAGCU | 10421 | ACGACCTGCTGTGTCCTAGCT |
| 4757 | ACGAGGAAAGGAAGAAACCAA | 10422 | ACGAGGAAAGGAAGAAACCAA |
| 4758 | ACGAGGAGCACGAUGGGGAGG | 10423 | ACGAGGAGCACGATGGGGAGG |
| 4759 | ACGAGGAGCACUGUAGGGAGA | 10424 | ACGAGGAGCACTGTAGGGAGA |
| 4760 | ACGAUCACGGCUUUGAAGUCC | 10425 | ACGATCACGGCTTTGAAGTCC |
| 4761 | ACGAUCCAGACUGGAGGAUUU | 10426 | ACGATCCAGACTGGAGGATTT |
| 4762 | ACGAUGGCCCUUGGCUUGGAG | 10427 | ACGATGGCCCTTGGCTTGGAG |
| 4763 | ACGAUGGGGAGGACAAUGGAC | 10428 | ACGATGGGGAGGACAATGGAC |
| 4764 | ACGCAGAGCUGGCUGCAGGUG | 10429 | ACGCAGAGCTGGCTGCAGGTG |
| 4765 | ACGCAGCCAACUUCAUCGCUC | 10430 | ACGCAGCCAACTTCATCGCTC |
| 4766 | ACGCAUUUACGUGCUCCGAAA | 10431 | ACGCATTTACGTGCTCCGAAA |
| 4767 | ACGCCACGUCAUCCUCCAGAC | 10432 | ACGCCACGTCATCCTCCAGAC |
| 4768 | ACGCCAUGAAUCCCUUUCCUG | 10433 | ACGCCATGAATCCCTTTCCTG |
| 4769 | ACGCCCGGCUAAUUUUUUGUA | 10434 | ACGCCCGGCTAATTTTTTGTA |
| 4770 | ACGCCCUUGGUAUCCGCAACA | 10435 | ACGCCCTTGGTATCCGCAACA |
| 4771 | ACGCCGUGGGCUCUGUCAAGC | 10436 | ACGCCGTGGGCTCTGTCAAGC |
| 4772 | ACGCGGGAGUCUGACGGAGGC | 10437 | ACGCGGGAGTCTGACGGAGGC |
| 4773 | ACGCUACUGGGCUUCUUCUCA | 10438 | ACGCTACTGGGCTTCTTCTCA |
| 4774 | ACGCUCUGUCACACAGCUGCC | 10439 | ACGCTCTGTCACACAGCTGCC |
| 4775 | ACGGAGGCUGUCACUGUCUCU | 10440 | ACGGAGGCTGTCACTGTCTCT |
| 4776 | ACGGAGGGCGACUCGUGUAUG | 10441 | ACGGAGGGCGACTCGTGTATG |
| 4777 | ACGGAGGUGUCGCCACAGAGC | 10442 | ACGGAGGTGTCGCCACAGAGC |
| 4778 | ACGGAGUCUCGCUCUGUCGCC | 10443 | ACGGAGTCTCGCTCTGTCGCC |
| 4779 | ACGGAUUCAGCCAGAUCAUUU | 10444 | ACGGATTCAGCCAGATCATTT |
| 4780 | ACGGCCAAGGAGAAGGGGUGG | 10445 | ACGGCCAAGGAGAAGGGGTGG |
| 4781 | ACGGCCAAGGUAACCGGGUGU | 10446 | ACGGCCAAGGTAACCGGGTGT |
| 4782 | ACGGCCCCCACAGCUGAAGUC | 10447 | ACGGCCCCCACAGCTGAAGTC |
| 4783 | ACGGCGAUUUCAGAAAGAACC | 10448 | ACGGCGATTTCAGAAAGAACC |
| 4784 | ACGGCUGUGGAGCUGACCUUU | 10449 | ACGGCTGTGGAGCTGACCTTT |
| 4785 | ACGGCUUUGAAGUCCCGGUCA | 10450 | ACGGCTTTGAAGTCCCGGTCA |
| 4786 | ACGGGAAUGGAAGUGGGUAGG | 10451 | ACGGGAATGGAAGTGGGTAGG |
| 4787 | ACGGGACUCCAGGCAGAUGUU | 10452 | ACGGGACTCCAGGCAGATGTT |
| 4788 | ACGGGCUUUCCCUGGCCUGGG | 10453 | ACGGGCTTTCCCTGGCCTGGG |
| 4789 | ACGGGGACAUCAUUCUCCCAA | 10454 | ACGGGGACATCATTCTCCCAA |
| 4790 | ACGGGGUUGUCAAAGUUGAUG | 10455 | ACGGGGTTGTCAAAGTTGATG |
| 4791 | ACGGGGUUUCACGUGUUAGCC | 10456 | ACGGGGTTTCACGTGTTAGCC |
| 4792 | ACGGUCCAGCGCAAUUUCCAG | 10457 | ACGGTCCAGCGCAATTTCCAG |
| 4793 | ACGGUGGAGAGAAACUCAAAA | 10458 | ACGGTGGAGAGAAACTCAAAA |
| 4794 | ACGGUGGAUGUCUCCUGGGUG | 10459 | ACGGTGGATGTCTCCTGGGTG |
| 4795 | ACGGUGUCAUAGGAAGAGACG | 10460 | ACGGTGTCATAGGAAGAGACG |
| 4796 | ACGGUUCCCUGCACUGGGGGG | 10461 | ACGGTTCCCTGCACTGGGGGG |
| 4797 | ACGUAAAGACCCCUACAGCGC | 10462 | ACGTAAAGACCCCTACAGCGC |
| 4798 | ACGUCAUCCUCCAGACUGACC | 10463 | ACGTCATCCTCCAGACTGACC |
| 4799 | ACGUCGCCCAGAGCUUGGUGA | 10464 | ACGTCGCCCAGAGCTTGGTGA |
| 4800 | ACGUCUCCUGGGACUCAUCAG | 10465 | ACGTCTCCTGGGACTCATCAG |
| 4801 | ACGUCUUGGGGGAGCACGUCU | 10466 | ACGTCTTGGGGGAGCACGTCT |
| 4802 | ACGUCUUGGGGGGACAGCCUU | 10467 | ACGTCTTGGGGGGACAGCCTT |
| 4803 | ACGUGCCACCGUACCCAGCUG | 10468 | ACGTGCCACCGTACCCAGCTG |
| 4804 | ACGUGCUCCGAAACCAGAAAG | 10469 | ACGTGCTCCGAAACCAGAAAG |
| 4805 | ACGUGGCUGAAGAUCUCGGCU | 10470 | ACGTGGCTGAAGATCTCGGCT |
| 4806 | ACGUGGGAACAGCCGCCGUUG | 10471 | ACGTGGGAACAGCCGCCGTTG |
| 4807 | ACGUGUCCUCACGGCCAAGGU | 10472 | ACGTGTCCTCACGGCCAAGGT |
| 4808 | ACGUGUUAGCCAGGAUGGUCU | 10473 | ACGTGTTAGCCAGGATGGTCT |
| 4809 | ACGUUCCUCAGGUUGGGGAUG | 10474 | ACGTTCCTCAGGTTGGGGATG |
| 4810 | ACGUUGACUCCUGAGUUUAGG | 10475 | ACGTTGACTCCTGAGTTTAGG |
| 4811 | ACGUUUCAACCUCGUAAGGAA | 10476 | ACGTTTCAACCTCGTAAGGAA |
| 4812 | ACGUUUUCCUCUUCACGCCCU | 10477 | ACGTTTTCCTCTTCACGCCCT |
| 4813 | ACUACAGGUGCCCGCCACCAC | 10478 | ACTACAGGTGCCCGCCACCAC |
| 4814 | ACUAGGUGGGCGGACAUAAAG | 10479 | ACTAGGTGGGCGGACATAAAG |
| 4815 | ACUAUCUCCACCGUGGUGAGC | 10480 | ACTATCTCCACCGTGGTGAGC |
| 4816 | ACUAUCUGUACAGGGACGCAU | 10481 | ACTATCTGTACAGGGACGCAT |
| 4817 | ACUAUGUUGCCCAGGCUGGAA | 10482 | ACTATGTTGCCCAGGCTGGAA |
| 4818 | ACUCAAAACUUCCUGGAGAGA | 10483 | ACTCAAAACTTCCTGGAGAGA |
| 4819 | ACUCAAGUGAUCCAGCUCAGC | 10484 | ACTCAAGTGATCCAGCTCAGC |
| 4820 | ACUCAGCGCUGCCAUCGCAGA | 10485 | ACTCAGCGCTGCCATCGCAGA |
| 4821 | ACUCAGGCUCUGCCUCUGGGA | 10486 | ACTCAGGCTCTGCCTCTGGGA |
| 4822 | ACUCAUACAUACAACGGGGAC | 10487 | ACTCATACATACAACGGGGAC |
| 4823 | ACUCAUCAGAGCCAUCCUGGC | 10488 | ACTCATCAGAGCCATCCTGGC |
| 4824 | ACUCAUCCGAGCCAUCUUCGC | 10489 | ACTCATCCGAGCCATCTTCGC |
| 4825 | ACUCAUCGAUAUCGCACUCUU | 10490 | ACTCATCGATATCGCACTCTT |
| 4826 | ACUCAUCGAUAUCUUCGCAUC | 10491 | ACTCATCGATATCTTCGCATC |
| 4827 | ACUCCAGGCAGAUGUUCACGC | 10492 | ACTCCAGGCAGATGTTCACGC |
| 4828 | ACUCCUCUUGGCUGGGUGAGG | 10493 | ACTCCTCTTGGCTGGGTGAGG |
| 4829 | ACUCCUGAACUCAAGUGAUCC | 10494 | ACTCCTGAACTCAAGTGATCC |
| 4830 | ACUCCUGAGUUUAGGGGUUUG | 10495 | ACTCCTGAGTTTAGGGGTTTG |
| 4831 | ACUCGAAGGCCGAGCAGGGGC | 10496 | ACTCGAAGGCCGAGCAGGGGC |
| 4832 | ACUCGCCACUUAGGCAGUGGA | 10497 | ACTCGCCACTTAGGCAGTGGA |
| 4833 | ACUCGCUCCGGUCCAGCGUCA | 10498 | ACTCGCTCCGGTCCAGCGTCA |
| 4834 | ACUCGUAGCCGAUCUUAAGGU | 10499 | ACTCGTAGCCGATCTTAAGGT |
| 4835 | ACUCGUCCUGGGAGCACGUCU | 10500 | ACTCGTCCTGGGAGCACGTCT |
| 4836 | ACUCGUGUAUGUCGCGGAGGC | 10501 | ACTCGTGTATGTCGCGGAGGC |
| 4837 | ACUCGUUUCUUUCGCAUCUGU | 10502 | ACTCGTTTCTTTCGCATCTGT |
| 4838 | ACUCUGAACUGAGAAAGUGCA | 10503 | ACTCTGAACTGAGAAAGTGCA |
| 4839 | ACUCUUUGAUGGGUUCAUCUG | 10504 | ACTCTTTGATGGGTTCATCTG |
| 4840 | ACUGAAAAUGGCUUCGUUGAU | 10505 | ACTGAAAATGGCTTCGTTGAT |
| 4841 | ACUGAACAAAUACAGCAACCA | 10506 | ACTGAACAAATACAGCAACCA |
| 4842 | ACUGAAUGUUUUCAGUCACCA | 10507 | ACTGAATGTTTTCAGTCACCA |
| 4843 | ACUGACCAUCGAGGGGUAGCU | 10508 | ACTGACCATCGAGGGGTAGCT |
| 4844 | ACUGACCAUCUGUCUCGAGGG | 10509 | ACTGACCATCTGTCTCGAGGG |
| 4845 | ACUGAGAAAGUGCAAGGAGAC | 10510 | ACTGAGAAAGTGCAAGGAGAC |
| 4846 | ACUGAGGAAUGCAGCGGUUGA | 10511 | ACTGAGGAATGCAGCGGTTGA |
| 4847 | ACUGAGGAGAUCUAGGGUGAU | 10512 | ACTGAGGAGATCTAGGGTGAT |
| 4848 | ACUGCAACCUCCACCUCCUGG | 10513 | ACTGCAACCTCCACCTCCTGG |
| 4849 | ACUGCAAGCUCCGCUUCCCGG | 10514 | ACTGCAAGCTCCGCTTCCCGG |
| 4850 | ACUGCAGCCUCAGCCUCUCUU | 10515 | ACTGCAGCCTCAGCCTCTCTT |
| 4851 | ACUGCAGCCUCAGCCUCUGUG | 10516 | ACTGCAGCCTCAGCCTCTGTG |
| 4852 | ACUGCAGUCCCCGCCGCGGCG | 10517 | ACTGCAGTCCCCGCCGCGGCG |
| 4853 | ACUGCAGUGGCGCAAUCUCGG | 10518 | ACTGCAGTGGCGCAATCTCGG |
| 4854 | ACUGCCGAGAGAUGCACUUCC | 10519 | ACTGCCGAGAGATGCACTTCC |
| 4855 | ACUGCCGGCUGCCAUGGAUGC | 10520 | ACTGCCGGCTGCCATGGATGC |
| 4856 | ACUGCGCCCGGCCUCACCGUG | 10521 | ACTGCGCCCGGCCTCACCGTG |
| 4857 | ACUGCGGACUGCAGUGGCGCA | 10522 | ACTGCGGACTGCAGTGGCGCA |
| 4858 | ACUGGAACUCGUUUCUUUCGC | 10523 | ACTGGAACTCGTTTCTTTCGC |
| 4859 | ACUGGAAGCUGGCGGGACCAC | 10524 | ACTGGAAGCTGGCGGGACCAC |
| 4860 | ACUGGAAUUCGUCAGGGCGAC | 10525 | ACTGGAATTCGTCAGGGCGAC |
| 4861 | ACUGGAGGAUUUAUUUAUUUU | 10526 | ACTGGAGGATTTATTTATTTT |
| 4862 | ACUGGCACUUGUAGCCACCCU | 10527 | ACTGGCACTTGTAGCCACCCT |
| 4863 | ACUGGCAGCCGCCAUUGCUCA | 10528 | ACTGGCAGCCGCCATTGCTCA |
| 4864 | ACUGGGCUUCUUCUCAUUUCC | 10529 | ACTGGGCTTCTTCTCATTTCC |
| 4865 | ACUGGGGGGGACACAGUGUUU | 10530 | ACTGGGGGGGACACAGTGTTT |
| 4866 | ACUGGGUGGGUCAUGAUUCGG | 10531 | ACTGGGTGGGTCATGATTCGG |
| 4867 | ACUGUAGGGAGAGGCACGCUC | 10532 | ACTGTAGGGAGAGGCACGCTC |
| 4868 | ACUGUCCCCUUGGAACACGUA | 10533 | ACTGTCCCCTTGGAACACGTA |
| 4869 | ACUGUCCGAAGCCUGUUCUGC | 10534 | ACTGTCCGAAGCCTGTTCTGC |
| 4870 | ACUGUCUCUCCGGACAUCAGU | 10535 | ACTGTCTCTCCGGACATCAGT |
| 4871 | ACUUAAUAAAUAUUAAGGGUG | 10536 | ACTTAATAAATATTAAGGGTG |
| 4872 | ACUUAGGCAGUGGAACUCGAA | 10537 | ACTTAGGCAGTGGAACTCGAA |
| 4873 | ACUUCAUCGCUCAUGUCCUUG | 10538 | ACTTCATCGCTCATGTCCTTG |
| 4874 | ACUUCCCAUCGUGGCAGCGAA | 10539 | ACTTCCCATCGTGGCAGCGAA |
| 4875 | ACUUCCUGGAGAGAAAUGGAG | 10540 | ACTTCCTGGAGAGAAATGGAG |
| 4876 | ACUUCGCCAGGAGGGCCCAGG | 10541 | ACTTCGCCAGGAGGGCCCAGG |
| 4877 | ACUUGAACUUGUUGGGUCCCU | 10542 | ACTTGAACTTGTTGGGTCCCT |
| 4878 | ACUUGAUCGGGGCUGGUGGGG | 10543 | ACTTGATCGGGGCTGGTGGGG |
| 4879 | ACUUGCUUCUCUGGGCCUGAC | 10544 | ACTTGCTTCTCTGGGCCTGAC |
| 4880 | ACUUGGCCAUCGCACCUCCAG | 10545 | ACTTGGCCATCGCACCTCCAG |
| 4881 | ACUUGGGCGAGUGGGGGUUGA | 10546 | ACTTGGGCGAGTGGGGGTTGA |
| 4882 | ACUUGUAGCCACCCUCCAGGU | 10547 | ACTTGTAGCCACCCTCCAGGT |
| 4883 | ACUUGUAGGAGAUGCAUUUCC | 10548 | ACTTGTAGGAGATGCATTTCC |
| 4884 | ACUUGUCGUCGCCUUUGUGAC | 10549 | ACTTGTCGTCGCCTTTGTGAC |
| 4885 | ACUUGUUGGGUCCCUCGCAGA | 10550 | ACTTGTTGGGTCCCTCGCAGA |
| 4886 | ACUUUGUCCAGGGUGAUGCAU | 10551 | ACTTTGTCCAGGGTGATGCAT |
| 4887 | ACUUUGUCCUCAAAGACGGCC | 10552 | ACTTTGTCCTCAAAGACGGCC |
| 4888 | ACUUUUUGGUUUUUGUAGAGA | 10553 | ACTTTTTGGTTTTTGTAGAGA |
| 4889 | AGAAAACAGUGCAAAAUAAUA | 10554 | AGAAAACAGTGCAAAATAATA |
| 4890 | AGAAACCAAAAUCCCAACCCA | 10555 | AGAAACCAAAATCCCAACCCA |
| 4891 | AGAAACUCAAAACUUCCUGGA | 10556 | AGAAACTCAAAACTTCCTGGA |
| 4892 | AGAAAGAACCUGAAGUCCCGU | 10557 | AGAAAGAACCTGAAGTCCCGT |
| 4893 | AGAAAGGCUUAUCACGGUUCC | 10558 | AGAAAGGCTTATCACGGTTCC |
| 4894 | AGAAAGUGCAAGGAGACCACG | 10559 | AGAAAGTGCAAGGAGACCACG |
| 4895 | AGAAAUGGAGGUGUCAUCCUG | 10560 | AGAAATGGAGGTGTCATCCTG |
| 4896 | AGAAAUUUAAUUGAUCACAGU | 10561 | AGAAATTTAATTGATCACAGT |
| 4897 | AGAACCAUAUCCUCUGGGGAC | 10562 | AGAACCATATCCTCTGGGGAC |
| 4898 | AGAACCUGAAGUCCCGUCAAA | 10563 | AGAACCTGAAGTCCCGTCAAA |
| 4899 | AGAACUGAGGAAUGCAGCGGU | 10564 | AGAACTGAGGAATGCAGCGGT |
| 4900 | AGAAGAGGCAUUUCAGAGGCA | 10565 | AGAAGAGGCATTTCAGAGGCA |
| 4901 | AGAAGAGGUAAACACGUUGAC | 10566 | AGAAGAGGTAAACACGTTGAC |
| 4902 | AGAAGAGGUAGGCGAUGGAGC | 10567 | AGAAGAGGTAGGCGATGGAGC |
| 4903 | AGAAGCCACUCAUACAUACAA | 10568 | AGAAGCCACTCATACATACAA |
| 4904 | AGAAGGAAGACCCCCAGGCAA | 10569 | AGAAGGAAGACCCCCAGGCAA |
| 4905 | AGAAGGGGUGGGCCAGCCUCU | 10570 | AGAAGGGGTGGGCCAGCCTCT |
| 4906 | AGAAGUGGAAGCACUAGGUGG | 10571 | AGAAGTGGAAGCACTAGGTGG |
| 4907 | AGAAUAGUCACUGAACAAAUA | 10572 | AGAATAGTCACTGAACAAATA |
| 4908 | AGACAAGCACGUCUCCUGGGA | 10573 | AGACAAGCACGTCTCCTGGGA |
| 4909 | AGACACUGGGUGGGUCAUGAU | 10574 | AGACACTGGGTGGGTCATGAT |
| 4910 | AGACAGCCUUGCUCGUCUGAG | 10575 | AGACAGCCTTGCTCGTCTGAG |
| 4911 | AGACAGUGCCCAGGACAGAGU | 10576 | AGACAGTGCCCAGGACAGAGT |
| 4912 | AGACAUUCAGGCUACAAAAAC | 10577 | AGACATTCAGGCTACAAAAAC |
| 4913 | AGACAUUGUCACUAUCUCCAC | 10578 | AGACATTGTCACTATCTCCAC |
| 4914 | AGACCAAGGAGGGGGGGGGAG | 10579 | AGACCAAGGAGGGGCGGGGAG |
| 4915 | AGACCACGGGAAUGGAAGUGG | 10580 | AGACCACGGGAATGGAAGTGG |
| 4916 | AGACCAGAGACCCAGCUCCGU | 10581 | AGACCAGAGACCCAGCTCCGT |
| 4917 | AGACCAGUAGAUUCUAUUGCU | 10582 | AGACCAGTAGATTCTATTGCT |
| 4918 | AGACCCACUUGUAGGAGAUGC | 10583 | AGACCCACTTGTAGGAGATGC |
| 4919 | AGACCCAGCUCCGUGGCGAUG | 10584 | AGACCCAGCTCCGTGGCGATG |
| 4920 | AGACCCCCAGGCAAAGGAAGA | 10585 | AGACCCCCAGGCAAAGGAAGA |
| 4921 | AGACCCCUACAGCGCUGCGGC | 10586 | AGACCCCTACAGCGCTGCGGC |
| 4922 | AGACGAACUGCCGAGAGAUGC | 10587 | AGACGAACTGCCGAGAGATGC |
| 4923 | AGACGACAAUGGCAGUUCUCG | 10588 | AGACGACAATGGCAGTTCTCG |
| 4924 | AGACGAGGAGCACGAUGGGGA | 10589 | AGACGAGGAGCACGATGGGGA |
| 4925 | AGACGAGGAGCACUGUAGGGA | 10590 | AGACGAGGAGCACTGTAGGGA |
| 4926 | AGACGCCGUGGGCUCUGUCAA | 10591 | AGACGCCGTGGGCTCTGTCAA |
| 4927 | AGACGGAGUCUCGCUCUGUCG | 10592 | AGACGGAGTCTCGCTCTGTCG |
| 4928 | AGACGGCCAAGGAGAAGGGGU | 10593 | AGACGGCCAAGGAGAAGGGGT |
| 4929 | AGACGGGGUUGUCAAAGUUGA | 10594 | AGACGGGGTTGTCAAAGTTGA |
| 4930 | AGACGGGGUUUCACGUGUUAG | 10595 | AGACGGGGTTTCACGTGTTAG |
| 4931 | AGACGUGGGAACAGCCGCCGU | 10596 | AGACGTGGGAACAGCCGCCGT |
| 4932 | AGACUGACCAUCGAGGGGUAG | 10597 | AGACTGACCATCGAGGGGTAG |
| 4933 | AGACUGACCAUCUGUCUCGAG | 10598 | AGACTGACCATCTGTCTCGAG |
| 4934 | AGACUGCGGACUGCAGUGGCG | 10599 | AGACTGCGGACTGCAGTGGCG |
| 4935 | AGACUGGAGGAUUUAUUUAUU | 10600 | AGACTGGAGGATTTATTTATT |
| 4936 | AGACUUUGUCCAGGGUGAUGC | 10601 | AGACTTTGTCCAGGGTGATGC |
| 4937 | AGAGAAACUCAAAACUUCCUG | 10602 | AGAGAAACTCAAAACTTCCTG |
| 4938 | AGAGAAAUGGAGGUGUCAUCC | 10603 | AGAGAAATGGAGGTGTCATCC |
| 4939 | AGAGAACCAUAUCCUCUGGGG | 10604 | AGAGAACCATATCCTCTGGGG |
| 4940 | AGAGACAGUGCCCAGGACAGA | 10605 | AGAGACAGTGCCCAGGACAGA |
| 4941 | AGAGACCCAGCUCCGUGGCGA | 10606 | AGAGACCCAGCTCCGTGGCGA |
| 4942 | AGAGACGCCGUGGGCUCUGUC | 10607 | AGAGACGCCGTGGGCTCTGTC |
| 4943 | AGAGACGGGGUUUCACGUGUU | 10608 | AGAGACGGGGTTTCACGTGTT |
| 4944 | AGAGAUGCACUUCCCAUCGUG | 10609 | AGAGATGCACTTCCCATCGTG |
| 4945 | AGAGAUGGGAUCUCGCUUUGU | 10610 | AGAGATGGGATCTCGCTTTGT |
| 4946 | AGAGAUGGGGUCUUACUAUGU | 10611 | AGAGATGGGGTCTTACTATGT |
| 4947 | AGAGAUUGGUGGAUGAGGCAG | 10612 | AGAGATTGGTGGATGAGGCAG |
| 4948 | AGAGCACAGCGGAAACCGGGG | 10613 | AGAGCACAGCGGAAACCGGGG |
| 4949 | AGAGCACUGGAAUUCGUCAGG | 10614 | AGAGCACTGGAATTCGTCAGG |
| 4950 | AGAGCCAUCCUGGCACUCAGC | 10615 | AGAGCCATCCTGGCACTCAGC |
| 4951 | AGAGCCCUCACGCUACUGGGC | 10616 | AGAGCCCTCACGCTACTGGGC |
| 4952 | AGAGCGACCACGUUCCUCAGG | 10617 | AGAGCGACCACGTTCCTCAGG |
| 4953 | AGAGCUGGCUGCAGGUGUCGG | 10618 | AGAGCTGGCTGCAGGTGTCGG |
| 4954 | AGAGCUUGGUGAGACAUUGUC | 10619 | AGAGCTTGGTGAGACATTGTC |
| 4955 | AGAGGCAAUAACCCCCUACAC | 10620 | AGAGGCAATAACCCCCTACAC |
| 4956 | AGAGGCACGCUCUGUCACACA | 10621 | AGAGGCACGCTCTGTCACACA |
| 4957 | AGAGGCAUUUCAGAGGCAAUA | 10622 | AGAGGCATTTCAGAGGCAATA |
| 4958 | AGAGGCCAUGGGCUGCUGAUG | 10623 | AGAGGCCATGGGCTGCTGATG |
| 4959 | AGAGGCGGCCACUGAGGAGAU | 10624 | AGAGGCGGCCACTGAGGAGAT |
| 4960 | AGAGGUAAACACGUUGACUCC | 10625 | AGAGGTAAACACGTTGACTCC |
| 4961 | AGAGGUAGGCGAUGGAGCCCA | 10626 | AGAGGTAGGCGATGGAGCCCA |
| 4962 | AGAGUCGGUCCAGUAGAUGUU | 10627 | AGAGTCGGTCCAGTAGATGTT |
| 4963 | AGAGUGUCACAUUAACGCAGC | 10628 | AGAGTGTCACATTAACGCAGC |
| 4964 | AGAGUGUCAGACAGCCUUGCU | 10629 | AGAGTGTCAGACAGCCTTGCT |
| 4965 | AGAUACUGGCAGCCGCCAUUG | 10630 | AGATACTGGCAGCCGCCATTG |
| 4966 | AGAUCAUUCUCUGGGACAGGU | 10631 | AGATCATTCTCTGGGACAGGT |
| 4967 | AGAUCAUUUCCGACGCCAUGA | 10632 | AGATCATTTCCGACGCCATGA |
| 4968 | AGAUCUAGGGUGAUGCCAUUG | 10633 | AGATCTAGGGTGATGCCATTG |
| 4969 | AGAUCUCGGCUGCAGACCAAG | 10634 | AGATCTCGGCTGCAGACCAAG |
| 4970 | AGAUGAAUAAAUAUAUAAAAC | 10635 | AGATGAATAAATATATAAAAC |
| 4971 | AGAUGCACUUCCCAUCGUGGC | 10636 | AGATGCACTTCCCATCGTGGC |
| 4972 | AGAUGCAUUUCCCGUCUUGGC | 10637 | AGATGCATTTCCCGTCTTGGC |
| 4973 | AGAUGGAGUGAAGUUUGGAGU | 10638 | AGATGGAGTGAAGTTTGGAGT |
| 4974 | AGAUGGGAUCUCGCUUUGUUG | 10639 | AGATGGGATCTCGCTTTGTTG |
| 4975 | AGAUGGGGUCUUACUAUGUUG | 10640 | AGATGGGGTCTTACTATGTTG |
| 4976 | AGAUGGUCUUCCGGUUGCCCC | 10641 | AGATGGTCTTCCGGTTGCCCC |
| 4977 | AGAUGUCCACACCAUUCAGGC | 10642 | AGATGTCCACACCATTCAGGC |
| 4978 | AGAUGUUCACGCCACGUCAUC | 10643 | AGATGTTCACGCCACGTCATC |
| 4979 | AGAUGUUGCUGUGGAUCCAGU | 10644 | AGATGTTGCTGTGGATCCAGT |
| 4980 | AGAUUCUAUUGCUGGCCACCU | 10645 | AGATTCTATTGCTGGCCACCT |
| 4981 | AGAUUCUGAGGCAACGUUUCA | 10646 | AGATTCTGAGGCAACGTTTCA |
| 4982 | AGAUUGGGGAAGUGAAUGGCU | 10647 | AGATTGGGGAAGTGAATGGCT |
| 4983 | AGAUUGGUGGAUGAGGCAGGG | 10648 | AGATTGGTGGATGAGGCAGGG |
| 4984 | AGAUUUGUCCUUGCAGUCGGG | 10649 | AGATTTGTCCTTGCAGTCGGG |
| 4985 | AGAUUUUAUAUAUAUGUGUGU | 10650 | AGATTTTATATATATGTGTGT |
| 4986 | AGCAACCAGGGUUUGCAAAAA | 10651 | AGCAACCAGGGTTTGCAAAAA |
| 4987 | AGCAACGUCGCCCAGAGCUUG | 10652 | AGCAACGTCGCCCAGAGCTTG |
| 4988 | AGCAAGGCGACGGUCCAGCGC | 10653 | AGCAAGGCGACGGTCCAGCGC |
| 4989 | AGCAAGGCUUGCAUAGAAGAG | 10654 | AGCAAGGCTTGCATAGAAGAG |
| 4990 | AGCACAGCGGAAACCGGGGAC | 10655 | AGCACAGCGGAAACCGGGGAC |
| 4991 | AGCACCGGGCAGGAGGCCUCG | 10656 | AGCACCGGGCAGGAGGCCTCG |
| 4992 | AGCACGAUGGGGAGGACAAUG | 10657 | AGCACGATGGGGAGGACAATG |
| 4993 | AGCACGUCUCCUGGGACUCAU | 10658 | AGCACGTCTCCTGGGACTCAT |
| 4994 | AGCACGUCUUGGGGGAGCACG | 10659 | AGCACGTCTTGGGGGAGCACG |
| 4995 | AGCACGUCUUGGGGGGACAGC | 10660 | AGCACGTCTTGGGGGGACAGC |
| 4996 | AGCACUAGGUGGGCGGACAUA | 10661 | AGCACTAGGTGGGCGGACATA |
| 4997 | AGCACUGGAAUUCGUCAGGGC | 10662 | AGCACTGGAATTCGTCAGGGC |
| 4998 | AGCACUGUAGGGAGAGGCACG | 10663 | AGCACTGTAGGGAGAGGCACG |
| 4999 | AGCAGCAUGCCGUCCGGGCAG | 10664 | AGCAGCATGCCGTCCGGGCAG |
| 5000 | AGCAGGGGCUACUGUCCCCUU | 10665 | AGCAGGGGCTACTGTCCCCTT |
| 5001 | AGCAGUCCCGGUCUGAGUCAC | 10666 | AGCAGTCCCGGTCTGAGTCAC |
| 5002 | AGCAGUGGCAUAAUCAUAGCU | 10667 | AGCAGTGGCATAATCATAGCT |
| 5003 | AGCAUGCCGUCCGGGCAGGCG | 10668 | AGCATGCCGTCCGGGCAGGCG |
| 5004 | AGCAUUCGUUGGUCCCGCACU | 10669 | AGCATTCGTTGGTCCCGCACT |
| 5005 | AGCCAACAAGUUGACAUCGGA | 10670 | AGCCAACAAGTTGACATCGGA |
| 5006 | AGCCAACUUCAUCGCUCAUGU | 10671 | AGCCAACTTCATCGCTCATGT |
| 5007 | AGCCACACCUGGGUGCAGGCC | 10672 | AGCCACACCTGGGTGCAGGCC |
| 5008 | AGCCACCCUCCAGGUUCACGC | 10673 | AGCCACCCTCCAGGTTCACGC |
| 5009 | AGCCACUCAUACAUACAACGG | 10674 | AGCCACTCATACATACAACGG |
| 5010 | AGCCACUGCGCCCGGCCUCAC | 10675 | AGCCACTGCGCCCGGCCTCAC |
| 5011 | AGCCACUUGCUUCUCUGGGCC | 10676 | AGCCACTTGCTTCTCTGGGCC |
| 5012 | AGCCAGAUCAUUUCCGACGCC | 10677 | AGCCAGATCATTTCCGACGCC |
| 5013 | AGCCAGCCCGUCGGGGGCCUG | 10678 | AGCCAGCCCGTCGGGGGCCTG |
| 5014 | AGCCAGGAUGGUCUCGAUCUC | 10679 | AGCCAGGATGGTCTCGATCTC |
| 5015 | AGCCAUCCUGGCACUCAGCGC | 10680 | AGCCATCCTGGCACTCAGCGC |
| 5016 | AGCCAUCUUCGCAGUCGGGGU | 10681 | AGCCATCTTCGCAGTCGGGGT |
| 5017 | AGCCAUGAACAGGAUCCACCA | 10682 | AGCCATGAACAGGATCCACCA |
| 5018 | AGCCAUGUUGCAGACUUUGUC | 10683 | AGCCATGTTGCAGACTTTGTC |
| 5019 | AGCCAUUGCAUGGGCACUGUC | 10684 | AGCCATTGCATGGGCACTGTC |
| 5020 | AGCCCACAGCCUUGCAGGCCU | 10685 | AGCCCACAGCCTTGCAGGCCT |
| 5021 | AGCCCAGGGGUGGCCCCAGGC | 10686 | AGCCCAGGGGTGGCCCCAGGC |
| 5022 | AGCCCCAGGGCCCCAUGCUCG | 10687 | AGCCCCAGGGCCCCATGCTCG |
| 5023 | AGCCCGUCGGGGGCCUGGAUG | 10688 | AGCCCGTCGGGGGCCTGGATG |
| 5024 | AGCCCUCACGCUACUGGGCUU | 10689 | AGCCCTCACGCTACTGGGCTT |
| 5025 | AGCCGAUCUUAAGGUCAUUGC | 10690 | AGCCGATCTTAAGGTCATTGC |
| 5026 | AGCCGCCAGUUCUUCCAUAGA | 10691 | AGCCGCCAGTTCTTCCATAGA |
| 5027 | AGCCGCCAUUGCUCAGGGUGG | 10692 | AGCCGCCATTGCTCAGGGTGG |
| 5028 | AGCCGCCGUUGUUGUCCAAGC | 10693 | AGCCGCCGTTGTTGTCCAAGC |
| 5029 | AGCCGGGAGGUGUCGGGAACA | 10694 | AGCCGGGAGGTGTCGGGAACA |
| 5030 | AGCCGUCCAAGCAGUCCCGGU | 10695 | AGCCGTCCAAGCAGTCCCGGT |
| 5031 | AGCCGUCCUGGUUGUGGCAAA | 10696 | AGCCGTCCTGGTTGTGGCAAA |
| 5032 | AGCCGUCGGGGCACAGGCACU | 10697 | AGCCGTCGGGGCACAGGCACT |
| 5033 | AGCCGUUCUCCCUGAAUAACG | 10698 | AGCCGTTCTCCCTGAATAACG |
| 5034 | AGCCGUUGUCGCAGUCCACUU | 10699 | AGCCGTTGTCGCAGTCCACTT |
| 5035 | AGCCUCAAAUGCCUGAGCUCA | 10700 | AGCCTCAAATGCCTGAGCTCA |
| 5036 | AGCCUCAGCCUCUCUUGGCUG | 10701 | AGCCTCAGCCTCTCTTGGCTG |
| 5037 | AGCCUCAGCCUCUGUGAGGCA | 10702 | AGCCTCAGCCTCTGTGAGGCA |
| 5038 | AGCCUCCCAAAGUGCUGGGAU | 10703 | AGCCTCCCAAAGTGCTGGGAT |
| 5039 | AGCCUCCCAAGUAGCUGGGAU | 10704 | AGCCTCCCAAGTAGCTGGGAT |
| 5040 | AGCCUCCCGAGUAGCUGGGAC | 10705 | AGCCTCCCGAGTAGCTGGGAC |
| 5041 | AGCCUCGCCAUGCCUGGCCAG | 10706 | AGCCTCGCCATGCCTGGCCAG |
| 5042 | AGCCUCUCUUGGCUGGGUGAG | 10707 | AGCCTCTCTTGGCTGGGTGAG |
| 5043 | AGCCUCUGCCAGGCAGUGUCC | 10708 | AGCCTCTGCCAGGCAGTGTCC |
| 5044 | AGCCUCUGUGAGGCAGCUCCU | 10709 | AGCCTCTGTGAGGCAGCTCCT |
| 5045 | AGCCUCUUUUCAUCCUCCAAG | 10710 | AGCCTCTTTTCATCCTCCAAG |
| 5046 | AGCCUGACGGUGGAUGUCUCC | 10711 | AGCCTGACGGTGGATGTCTCC |
| 5047 | AGCCUGUUCUGCCUCCCAGAU | 10712 | AGCCTGTTCTGCCTCCCAGAT |
| 5048 | AGCCUUCCUCACACUGGCACU | 10713 | AGCCTTCCTCACACTGGCACT |
| 5049 | AGCCUUGCAGGCCUUCGUGUG | 10714 | AGCCTTGCAGGCCTTCGTGTG |
| 5050 | AGCCUUGCUCGUCUGAGCCGU | 10715 | AGCCTTGCTCGTCTGAGCCGT |
| 5051 | AGCGAAACUCGUCCUGGGAGC | 10716 | AGCGAAACTCGTCCTGGGAGC |
| 5052 | AGCGACCACGUUCCUCAGGUU | 10717 | AGCGACCACGTTCCTCAGGTT |
| 5053 | AGCGAGUAGAUGUCCACACCA | 10718 | AGCGAGTAGATGTCCACACCA |
| 5054 | AGCGCAAUUUCCAGCCCCAGG | 10719 | AGCGCAATTTCCAGCCCCAGG |
| 5055 | AGCGCAGUUUUCCUCGUCAGA | 10720 | AGCGCAGTTTTCCTCGTCAGA |
| 5056 | AGCGCCAGCUGGAGUGGAUGC | 10721 | AGCGCCAGCTGGAGTGGATGC |
| 5057 | AGCGCUGCCAUCGCAGACCCA | 10722 | AGCGCTGCCATCGCAGACCCA |
| 5058 | AGCGCUGCGGCCACUCAUCCG | 10723 | AGCGCTGCGGCCACTCATCCG |
| 5059 | AGCGGAAACCGGGGACUUCGC | 10724 | AGCGGAAACCGGGGACTTCGC |
| 5060 | AGCGGUUGACACGGCCCCCAC | 10725 | AGCGGTTGACACGGCCCCCAC |
| 5061 | AGCGUCAUCUUCCUGACCUCG | 10726 | AGCGTCATCTTCCTGACCTCG |
| 5062 | AGCGUUGCACACAGUCCAGUU | 10727 | AGCGTTGCACACAGTCCAGTT |
| 5063 | AGCUCAAACCAUCCUCCCACC | 10728 | AGCTCAAACCATCCTCCCACC |
| 5064 | AGCUCACGACAGCCUCAAAUG | 10729 | AGCTCACGACAGCCTCAAATG |
| 5065 | AGCUCAGCCUCCCAAAGUGCU | 10730 | AGCTCAGCCTCCCAAAGTGCT |
| 5066 | AGCUCCGCUUCCCGGGUUCAC | 10731 | AGCTCCGCTTCCCGGGTTCAC |
| 5067 | AGCUCCGUGGCGAUGGGGAGG | 10732 | AGCTCCGTGGCGATGGGGAGG |
| 5068 | AGCUCCUCAUGUCCCUGGCCA | 10733 | AGCTCCTCATGTCCCTGGCCA |
| 5069 | AGCUCUGGCAGGCAAUGCUUU | 10734 | AGCTCTGGCAGGCAATGCTTT |
| 5070 | AGCUGAAGUCCCCGGAUUUGC | 10735 | AGCTGAAGTCCCCGGATTTGC |
| 5071 | AGCUGACCUUUAGCCUGACGG | 10736 | AGCTGACCTTTAGCCTGACGG |
| 5072 | AGCUGAUUUUUAACUUUUUGG | 10737 | AGCTGATTTTTAACTTTTTGG |
| 5073 | AGCUGCCCCCGAGACCAGAGA | 10738 | AGCTGCCCCCGAGACCAGAGA |
| 5074 | AGCUGGAAACCCUGGCUUCCC | 10739 | AGCTGGAAACCCTGGCTTCCC |
| 5075 | AGCUGGAAGCCGUCGGGGCAC | 10740 | AGCTGGAAGCCGTCGGGGCAC |
| 5076 | AGCUGGAAGCCUUCCUCACAC | 10741 | AGCTGGAAGCCTTCCTCACAC |
| 5077 | AGCUGGAGUGGAUGCACUCGC | 10742 | AGCTGGAGTGGATGCACTCGC |
| 5078 | AGCUGGCGGGACCACAGGUGA | 10743 | AGCTGGCGGGACCACAGGTGA |
| 5079 | AGCUGGCUGCAGGUGUCGGGA | 10744 | AGCTGGCTGCAGGTGTCGGGA |
| 5080 | AGCUGGGACUACAGGUGCCCG | 10745 | AGCTGGGACTACAGGTGCCCG |
| 5081 | AGCUGGGAUCACAGGCACGUG | 10746 | AGCTGGGATCACAGGCACGTG |
| 5082 | AGCUGGGGGAUGCAGGUGGAG | 10747 | AGCTGGGGGATGCAGGTGGAG |
| 5083 | AGCUGGGUGCUGCAGAUCAUU | 10748 | AGCTGGGTGCTGCAGATCATT |
| 5084 | AGCUGUAGCCGUCCUGGUUGU | 10749 | AGCTGTAGCCGTCCTGGTTGT |
| 5085 | AGCUGUUGCACUGGAAGCUGG | 10750 | AGCTGTTGCACTGGAAGCTGG |
| 5086 | AGCUUGGUGAGACAUUGUCAC | 10751 | AGCTTGGTGAGACATTGTCAC |
| 5087 | AGGAAAGGAAGAAACCAAAAU | 10752 | AGGAAAGGAAGAAACCAAAAT |
| 5088 | AGGAACCGAGGCCUUGAGGGU | 10753 | AGGAACCGAGGCCTTGAGGGT |
| 5089 | AGGAACCGCGGAGGAACGCCA | 10754 | AGGAACCGCGGAGGAACGCCA |
| 5090 | AGGAAGAAACCAAAAUCCCAA | 10755 | AGGAAGAAACCAAAATCCCAA |
| 5091 | AGGAAGACCCCCAGGCAAAGG | 10756 | AGGAAGACCCCCAGGCAAAGG |
| 5092 | AGGAAGACGAGGAGCACGAUG | 10757 | AGGAAGACGAGGAGCACGATG |
| 5093 | AGGAAGACGAGGAGCACUGUA | 10758 | AGGAAGACGAGGAGCACTGTA |
| 5094 | AGGAAGAGACGCCGUGGGCUC | 10759 | AGGAAGAGACGCCGTGGGCTC |
| 5095 | AGGAAGGGUUCUGGGCAGGGA | 10760 | AGGAAGGGTTCTGGGCAGGGA |
| 5096 | AGGAAGGUACAAACCCACCUC | 10761 | AGGAAGGTACAAACCCACCTC |
| 5097 | AGGAAUGCAGCGGUUGACACG | 10762 | AGGAATGCAGCGGTTGACACG |
| 5098 | AGGACAAGGUGGGGACGGAGG | 10763 | AGGACAAGGTGGGGACGGAGG |
| 5099 | AGGACAAUGGACAGAGCCCUC | 10764 | AGGACAATGGACAGAGCCCTC |
| 5100 | AGGACAGAGUCGGUCCAGUAG | 10765 | AGGACAGAGTCGGTCCAGTAG |
| 5101 | AGGACAGCCUUGCUCGUCUGA | 10766 | AGGACAGCCTTGCTCGTCTGA |
| 5102 | AGGAGAAGGGGUGGGCCAGCC | 10767 | AGGAGAAGGGGTGGGCCAGCC |
| 5103 | AGGAGACCACGGGAAUGGAAG | 10768 | AGGAGACCACGGGAATGGAAG |
| 5104 | AGGAGAUCUAGGGUGAUGCCA | 10769 | AGGAGATCTAGGGTGATGCCA |
| 5105 | AGGAGAUGCAUUUCCCGUCUU | 10770 | AGGAGATGCATTTCCCGTCTT |
| 5106 | AGGAGCAAGGCGACGGUCCAG | 10771 | AGGAGCAAGGCGACGGTCCAG |
| 5107 | AGGAGCACGAUGGGGAGGACA | 10772 | AGGAGCACGATGGGGAGGACA |
| 5108 | AGGAGCACUGUAGGGAGAGGC | 10773 | AGGAGCACTGTAGGGAGAGGC |
| 5109 | AGGAGGCCUCGUCUGAGCCGU | 10774 | AGGAGGCCTCGTCTGAGCCGT |
| 5110 | AGGAGGGCCCAGGAUAACGGA | 10775 | AGGAGGGCCCAGGATAACGGA |
| 5111 | AGGAGGGGGGGGGAGAUUCUG | 10776 | AGGAGGGGGGGGGAGATTCTG |
| 5112 | AGGAUAACGGAGGGCGACUCG | 10777 | AGGATAACGGAGGGCGACTCG |
| 5113 | AGGAUCCACCACGAUGGCCCU | 10778 | AGGATCCACCACGATGGCCCT |
| 5114 | AGGAUGGGCACCAGGCUGGUG | 10779 | AGGATGGGCACCAGGCTGGTG |
| 5115 | AGGAUGGUCUCGAUCUCCUGA | 10780 | AGGATGGTCTCGATCTCCTGA |
| 5116 | AGGAUUGUGUCACGGUGGAGA | 10781 | AGGATTGTGTCACGGTGGAGA |
| 5117 | AGGAUUUAUUUAUUUUUUUAU | 10782 | AGGATTTATTTATTTTTTTAT |
| 5118 | AGGCAAAGGAAGACGAGGAGC | 10783 | AGGCAAAGGAAGACGAGGAGC |
| 5119 | AGGCAACGUUUCAACCUCGUA | 10784 | AGGCAACGTTTCAACCTCGTA |
| 5120 | AGGCAAUAACCCCCUACACAG | 10785 | AGGCAATAACCCCCTACACAG |
| 5121 | AGGCAAUGCUUUGGUCUUCUC | 10786 | AGGCAATGCTTTGGTCTTCTC |
| 5122 | AGGCACAGAUACUGGCAGCCG | 10787 | AGGCACAGATACTGGCAGCCG |
| 5123 | AGGCACCUGUGUCUGGCCAAA | 10788 | AGGCACCTGTGTCTGGCCAAA |
| 5124 | AGGCACGCUCUGUCACACAGC | 10789 | AGGCACGCTCTGTCACACAGC |
| 5125 | AGGCACGUGCCACCGUACCCA | 10790 | AGGCACGTGCCACCGTACCCA |
| 5126 | AGGCACUCGUAGCCGAUCUUA | 10791 | AGGCACTCGTAGCCGATCTTA |
| 5127 | AGGCACUUAAUAAAUAUUAAG | 10792 | AGGCACTTAATAAATATTAAG |
| 5128 | AGGCAGAUGUUCACGCCACGU | 10793 | AGGCAGATGTTCACGCCACGT |
| 5129 | AGGCAGCCGGGAGGUGUCGGG | 10794 | AGGCAGCCGGGAGGTGTCGGG |
| 5130 | AGGCAGCUCCUCAUGUCCCUG | 10795 | AGGCAGCTCCTCATGTCCCTG |
| 5131 | AGGCAGGGCCAGGGGGUCCCG | 10796 | AGGCAGGGCCAGGGGGTCCCG |
| 5132 | AGGCAGUGGAACUCGAAGGCC | 10797 | AGGCAGTGGAACTCGAAGGCC |
| 5133 | AGGCAGUGUCCCGACCCGGAU | 10798 | AGGCAGTGTCCCGACCCGGAT |
| 5134 | AGGCAUUUCAGAGGCAAUAAC | 10799 | AGGCATTTCAGAGGCAATAAC |
| 5135 | AGGCAUUUGCAUAGAAGUGGA | 10800 | AGGCATTTGCATAGAAGTGGA |
| 5136 | AGGCCACGUGUCCUCACGGCC | 10801 | AGGCCACGTGTCCTCACGGCC |
| 5137 | AGGCCAGACUGCGGACUGCAG | 10802 | AGGCCAGACTGCGGACTGCAG |
| 5138 | AGGCCAUGGGCUGCUGAUGCA | 10803 | AGGCCATGGGCTGCTGATGCA |
| 5139 | AGGCCCACAGCUGGGGGAUGC | 10804 | AGGCCCACAGCTGGGGGATGC |
| 5140 | AGGCCCCCUUUCUUGAUCUUG | 10805 | AGGCCCCCTTTCTTGATCTTG |
| 5141 | AGGCCGAGCAGGGGCUACUGU | 10806 | AGGCCGAGCAGGGGCTACTGT |
| 5142 | AGGCCGGCGAGGUCUCAGGAA | 10807 | AGGCCGGCGAGGTCTCAGGAA |
| 5143 | AGGCCUCGUCUGAGCCGUCCA | 10808 | AGGCCTCGTCTGAGCCGTCCA |
| 5144 | AGGCCUGGUCUCCAACUCCUG | 10809 | AGGCCTGGTCTCCAACTCCTG |
| 5145 | AGGCCUUCGUGUGGGGGUCCA | 10810 | AGGCCTTCGTGTGGGGGTCCA |
| 5146 | AGGCCUUGAGGGUGGCCGGGG | 10811 | AGGCCTTGAGGGTGGCCGGGG |
| 5147 | AGGCGACGGUCCAGCGCAAUU | 10812 | AGGCGACGGTCCAGCGCAATT |
| 5148 | AGGCGAUCCUCCUGCCUCAGC | 10813 | AGGCGATCCTCCTGCCTCAGC |
| 5149 | AGGCGAUGGAGCCCACAGCCU | 10814 | AGGCGATGGAGCCCACAGCCT |
| 5150 | AGGCGCAGGUAAACUUGGGCG | 10815 | AGGCGCAGGTAAACTTGGGCG |
| 5151 | AGGCGGCCACUGAGGAGAUCU | 10816 | AGGCGGCCACTGAGGAGATCT |
| 5152 | AGGCGGCUCCGGGGACCCGGG | 10817 | AGGCGGCTCCGGGGACCCGGG |
| 5153 | AGGCGGUUGGCACUGAAAAUG | 10818 | AGGCGGTTGGCACTGAAAATG |
| 5154 | AGGCGUGAGCCACUGCGCCCG | 10819 | AGGCGTGAGCCACTGCGCCCG |
| 5155 | AGGCGUGAGGCACCUGUGUCU | 10820 | AGGCGTGAGGCACCTGTGTCT |
| 5156 | AGGCUAACCUGGCUGUCUAGC | 10821 | AGGCTAACCTGGCTGTCTAGC |
| 5157 | AGGCUACAAAAACCUUCUAUA | 10822 | AGGCTACAAAAACCTTCTATA |
| 5158 | AGGCUCUGCCUCUGGGAAGUG | 10823 | AGGCTCTGCCTCTGGGAAGTG |
| 5159 | AGGCUGGAAAGCAGUGGCAUA | 10824 | AGGCTGGAAAGCAGTGGCATA |
| 5160 | AGGCUGGAGUGCAGUGGCUCG | 10825 | AGGCTGGAGTGCAGTGGCTCG |
| 5161 | AGGCUGGUGUACUCGCUCCGG | 10826 | AGGCTGGTGTACTCGCTCCGG |
| 5162 | AGGCUGGUGUCCUGACAGCCA | 10827 | AGGCTGGTGTCCTGACAGCCA |
| 5163 | AGGCUGUCACUGUCUCUCCGG | 10828 | AGGCTGTCACTGTCTCTCCGG |
| 5164 | AGGCUUAUCACGGUUCCCUGC | 10829 | AGGCTTATCACGGTTCCCTGC |
| 5165 | AGGCUUGCAUAGAAGAGGUAA | 10830 | AGGCTTGCATAGAAGAGGTAA |
| 5166 | AGGGACGCAUUUACGUGCUCC | 10831 | AGGGACGCATTTACGTGCTCC |
| 5167 | AGGGACGGGACUCCAGGCAGA | 10832 | AGGGACGGGACTCCAGGCAGA |
| 5168 | AGGGAGAGGCACGCUCUGUCA | 10833 | AGGGAGAGGCACGCTCTGTCA |
| 5169 | AGGGAGGCACAGAUACUGGCA | 10834 | AGGGAGGCACAGATACTGGCA |
| 5170 | AGGGCAAAGGCUAACCUGGCU | 10835 | AGGGCAAAGGCTAACCTGGCT |
| 5171 | AGGGCCAGGGGGUCCCGUUGG | 10836 | AGGGCCAGGGGGTCCCGTTGG |
| 5172 | AGGGCCCAGGAUAACGGAGGG | 10837 | AGGGCCCAGGATAACGGAGGG |
| 5173 | AGGGCCCCAUGCUCGCAGCCU | 10838 | AGGGCCCCATGCTCGCAGCCT |
| 5174 | AGGGCCCCGAGAAUAGUCACU | 10839 | AGGGCCCCGAGAATAGTCACT |
| 5175 | AGGGCGACAGGUGGCCACAGC | 10840 | AGGGCGACAGGTGGCCACAGC |
| 5176 | AGGGCGACAGGUGGCCACAGG | 10841 | AGGGCGACAGGTGGCCACAGG |
| 5177 | AGGGCGACUCGUGUAUGUCGC | 10842 | AGGGCGACTCGTGTATGTCGC |
| 5178 | AGGGCGCCCCCCAGGACAAGG | 10843 | AGGGCGCCCCCCAGGACAAGG |
| 5179 | AGGGGGGGGAGAUUCUGAGG | 10844 | AGGGGCGGGGAGATTCTGAGG |
| 5180 | AGGGGCUACUGUCCCCUUGGA | 10845 | AGGGGCTACTGTCCCCTTGGA |
| 5181 | AGGGGGUCCCGUUGGUGCCAU | 10846 | AGGGGGTCCCGTTGGTGCCAT |
| 5182 | AGGGGUAGCUGUAGCCGUCCU | 10847 | AGGGGTAGCTGTAGCCGTCCT |
| 5183 | AGGGGUCGGGAGGAUGGGCAC | 10848 | AGGGGTCGGGAGGATGGGCAC |
| 5184 | AGGGGUGGCCCCAGGCAGCCG | 10849 | AGGGGTGGCCCCAGGCAGCCG |
| 5185 | AGGGGUGGGCCAGCCUCUUUU | 10850 | AGGGGTGGGCCAGCCTCTTTT |
| 5186 | AGGGGUUUGGCUUAGAGAUUG | 10851 | AGGGGTTTGGCTTAGAGATTG |
| 5187 | AGGGUCUUCAUCUGUUGCCCA | 10852 | AGGGTCTTCATCTGTTGCCCA |
| 5188 | AGGGUGACCAGUGACUCAGGC | 10853 | AGGGTGACCAGTGACTCAGGC |
| 5189 | AGGGUGAUGCAUUCGCCGCUG | 10854 | AGGGTGATGCATTCGCCGCTG |
| 5190 | AGGGUGAUGCCAUUGGGCCAC | 10855 | AGGGTGATGCCATTGGGCCAC |
| 5191 | AGGGUGGCCGGGGGCCCCUCU | 10856 | AGGGTGGCCGGGGGCCCCTCT |
| 5192 | AGGGUGGUCCUCUCACACCAG | 10857 | AGGGTGGTCCTCTCACACCAG |
| 5193 | AGGGUUCUGGGCAGGGACGGG | 10858 | AGGGTTCTGGGCAGGGACGGG |
| 5194 | AGGGUUUGCAAAAAUAAAUAG | 10859 | AGGGTTTGCAAAAATAAATAG |
| 5195 | AGGUAAACACGUUGACUCCUG | 10860 | AGGTAAACACGTTGACTCCTG |
| 5196 | AGGUAAACUUGGGCGAGUGGG | 10861 | AGGTAAACTTGGGCGAGTGGG |
| 5197 | AGGUAACCGGGUGUCUCAGGC | 10862 | AGGTAACCGGGTGTCTCAGGC |
| 5198 | AGGUACAAACCCACCUCGAAA | 10863 | AGGTACAAACCCACCTCGAAA |
| 5199 | AGGUAGGCGAUGGAGCCCACA | 10864 | AGGTAGGCGATGGAGCCCACA |
| 5200 | AGGUCAGACCAGUAGAUUCUA | 10865 | AGGTCAGACCAGTAGATTCTA |
| 5201 | AGGUCAUUGCAGACGUGGGAA | 10866 | AGGTCATTGCAGACGTGGGAA |
| 5202 | AGGUCGGGUGGUUGUGUGCUG | 10867 | AGGTCGGGTGGTTGTGTGCTG |
| 5203 | AGGUCUCAGGAAGGGUUCUGG | 10868 | AGGTCTCAGGAAGGGTTCTGG |
| 5204 | AGGUGACAGACAAGCACGUCU | 10869 | AGGTGACAGACAAGCACGTCT |
| 5205 | AGGUGAGCACCGGGCAGGAGG | 10870 | AGGTGAGCACCGGGCAGGAGG |
| 5206 | AGGUGCCCGCCACCACGCCCG | 10871 | AGGTGCCCGCCACCACGCCCG |
| 5207 | AGGUGGAGCUGUUGCACUGGA | 10872 | AGGTGGAGCTGTTGCACTGGA |
| 5208 | AGGUGGCCACAGCGCAGUUUU | 10873 | AGGTGGCCACAGCGCAGTTTT |
| 5209 | AGGUGGCCACAGGACAGCCUU | 10874 | AGGTGGCCACAGGACAGCCTT |
| 5210 | AGGUGGGCGGACAUAAAGACG | 10875 | AGGTGGGCGGACATAAAGACG |
| 5211 | AGGUGGGGACGGAGGUGUCGC | 10876 | AGGTGGGGACGGAGGTGTCGC |
| 5212 | AGGUGUCAUCCUGGUCCCCCC | 10877 | AGGTGTCATCCTGGTCCCCCC |
| 5213 | AGGUGUCGCCACAGAGCACAG | 10878 | AGGTGTCGCCACAGAGCACAG |
| 5214 | AGGUGUCGGGAACAGGUCGGG | 10879 | AGGTGTCGGGAACAGGTCGGG |
| 5215 | AGGUGUCGGGAUCCUGACACU | 10880 | AGGTGTCGGGATCCTGACACT |
| 5216 | AGGUUCACGCAGAGCUGGCUG | 10881 | AGGTTCACGCAGAGCTGGCTG |
| 5217 | AGGUUGGGGAUGAGGCUGGUG | 10882 | AGGTTGGGGATGAGGCTGGTG |
| 5218 | AGGUUGUGGAAGAGAACCAUA | 10883 | AGGTTGTGGAAGAGAACCATA |
| 5219 | AGGUUUUCAGCCAACAAGUUG | 10884 | AGGTTTTCAGCCAACAAGTTG |
| 5220 | AGUAACACGGCGAUUUCAGAA | 10885 | AGTAACACGGCGATTTCAGAA |
| 5221 | AGUAAGACAUUCAGGCUACAA | 10886 | AGTAAGACATTCAGGCTACAA |
| 5222 | AGUACAUGAAGCCAUGAACAG | 10887 | AGTACATGAAGCCATGAACAG |
| 5223 | AGUAGAGACGGGGUUUCACGU | 10888 | AGTAGAGACGGGGTTTCACGT |
| 5224 | AGUAGAGGCGGCCACUGAGGA | 10889 | AGTAGAGGCGGCCACTGAGGA |
| 5225 | AGUAGAUGUCCACACCAUUCA | 10890 | AGTAGATGTCCACACCATTCA |
| 5226 | AGUAGAUGUUGCUGUGGAUCC | 10891 | AGTAGATGTTGCTGTGGATCC |
| 5227 | AGUAGAUUCUAUUGCUGGCCA | 10892 | AGTAGATTCTATTGCTGGCCA |
| 5228 | AGUAGCUGGGACUACAGGUGC | 10893 | AGTAGCTGGGACTACAGGTGC |
| 5229 | AGUAGCUGGGAUCACAGGCAC | 10894 | AGTAGCTGGGATCACAGGCAC |
| 5230 | AGUAGGUUUUCAGCCAACAAG | 10895 | AGTAGGTTTTCAGCCAACAAG |
| 5231 | AGUCAACCCAGUAGAGGCGGC | 10896 | AGTCAACCCAGTAGAGGCGGC |
| 5232 | AGUCACAGACGAACUGCCGAG | 10897 | AGTCACAGACGAACTGCCGAG |
| 5233 | AGUCACCAGCGAGUAGAUGUC | 10898 | AGTCACCAGCGAGTAGATGTC |
| 5234 | AGUCACUGAACAAAUACAGCA | 10899 | AGTCACTGAACAAATACAGCA |
| 5235 | AGUCAGUCCAGUACAUGAAGC | 10900 | AGTCAGTCCAGTACATGAAGC |
| 5236 | AGUCAUAUUCCCGGUCACACU | 10901 | AGTCATATTCCCGGTCACACT |
| 5237 | AGUCCACAGCCAGCCCGUCGG | 10902 | AGTCCACAGCCAGCCCGTCGG |
| 5238 | AGUCCACUUGGCCAUCGCACC | 10903 | AGTCCACTTGGCCATCGCACC |
| 5239 | AGUCCAGUACAUGAAGCCAUG | 10904 | AGTCCAGTACATGAAGCCATG |
| 5240 | AGUCCAGUUCGUGCAAAUAAU | 10905 | AGTCCAGTTCGTGCAAATAAT |
| 5241 | AGUCCCCGCCGCGGCGAGGAG | 10906 | AGTCCCCGCCGCGGCGAGGAG |
| 5242 | AGUCCCCGGAUUUGCAGGUGA | 10907 | AGTCCCCGGATTTGCAGGTGA |
| 5243 | AGUCCCGGCAGUCUCUAGCCA | 10908 | AGTCCCGGCAGTCTCTAGCCA |
| 5244 | AGUCCCGGUCAACCUGCCCCU | 10909 | AGTCCCGGTCAACCTGCCCCT |
| 5245 | AGUCCCGGUCUGAGUCACAGA | 10910 | AGTCCCGGTCTGAGTCACAGA |
| 5246 | AGUCCCGUCAAACGAUCCAGA | 10911 | AGTCCCGTCAAACGATCCAGA |
| 5247 | AGUCGGGGCCACCAUCACAGC | 10912 | AGTCGGGGCCACCATCACAGC |
| 5248 | AGUCGGGGUCGUUGUCGCAGG | 10913 | AGTCGGGGTCGTTGTCGCAGG |
| 5249 | AGUCGGUCCAGUAGAUGUUGC | 10914 | AGTCGGTCCAGTAGATGTTGC |
| 5250 | AGUCUCGCUCUGUCGCCCAGG | 10915 | AGTCTCGCTCTGTCGCCCAGG |
| 5251 | AGUCUCUAGCCAUGUUGCAGA | 10916 | AGTCTCTAGCCATGTTGCAGA |
| 5252 | AGUCUGACGGAGGCUGUCACU | 10917 | AGTCTGACGGAGGCTGTCACT |
| 5253 | AGUGAAGUUUGGAGUCAACCC | 10918 | AGTGAAGTTTGGAGTCAACCC |
| 5254 | AGUGAAUGGCUUGGAGGCAUU | 10919 | AGTGAATGGCTTGGAGGCATT |
| 5255 | AGUGACACCCAUCUCCCAGAA | 10920 | AGTGACACCCATCTCCCAGAA |
| 5256 | AGUGACUCAGGCUCUGCCUCU | 10921 | AGTGACTCAGGCTCTGCCTCT |
| 5257 | AGUGAUAACAGUUUCAACCAA | 10922 | AGTGATAACAGTTTCAACCAA |
| 5258 | AGUGAUCCAGCUCAGCCUCCC | 10923 | AGTGATCCAGCTCAGCCTCCC |
| 5259 | AGUGCAAAAUAAUAACACAAA | 10924 | AGTGCAAAATAATAACACAAA |
| 5260 | AGUGCAAACAUAACAAAAAAU | 10925 | AGTGCAAACATAACAAAAAAT |
| 5261 | AGUGCAACAGUAACACGGCGA | 10926 | AGTGCAACAGTAACACGGCGA |
| 5262 | AGUGCAAGGAGACCACGGGAA | 10927 | AGTGCAAGGAGACCACGGGAA |
| 5263 | AGUGCAGUGGCUCGAUCAUGG | 10928 | AGTGCAGTGGCTCGATCATGG |
| 5264 | AGUGCCCAGGACAGAGUCGGU | 10929 | AGTGCCCAGGACAGAGTCGGT |
| 5265 | AGUGCUGGGAUUACAGGCGUG | 10930 | AGTGCTGGGATTACAGGCGTG |
| 5266 | AGUGGAACUCGAAGGCCGAGC | 10931 | AGTGGAACTCGAAGGCCGAGC |
| 5267 | AGUGGAAGCACUAGGUGGGCG | 10932 | AGTGGAAGCACTAGGTGGGCG |
| 5268 | AGUGGAUGCACUCGCCACUUA | 10933 | AGTGGATGCACTCGCCACTTA |
| 5269 | AGUGGCAUAAUCAUAGCUCAC | 10934 | AGTGGCATAATCATAGCTCAC |
| 5270 | AGUGGCAUCAUUUGGUGAAUG | 10935 | AGTGGCATCATTTGGTGAATG |
| 5271 | AGUGGCGCAAUCUCGGCUCAC | 10936 | AGTGGCGCAATCTCGGCTCAC |
| 5272 | AGUGGCUCGAUCAUGGCUCAC | 10937 | AGTGGCTCGATCATGGCTCAC |
| 5273 | AGUGGGGGUUGAUCUGCGGGG | 10938 | AGTGGGGGTTGATCTGCGGGG |
| 5274 | AGUGGGUAGGGGUCGGGAGGA | 10939 | AGTGGGTAGGGGTCGGGAGGA |
| 5275 | AGUGGUUUAAAAAGUGACACC | 10940 | AGTGGTTTAAAAAGTGACACC |
| 5276 | AGUGUACAACUCUGAACUGAG | 10941 | AGTGTACAACTCTGAACTGAG |
| 5277 | AGUGUCACAUUAACGCAGCCA | 10942 | AGTGTCACATTAACGCAGCCA |
| 5278 | AGUGUCAGACAGCCUUGCUCG | 10943 | AGTGTCAGACAGCCTTGCTCG |
| 5279 | AGUGUCCCGACCCGGAUCACG | 10944 | AGTGTCCCGACCCGGATCACG |
| 5280 | AGUGUUUUGUCCCUGGGGACA | 10945 | AGTGTTTTGTCCCTGGGGACA |
| 5281 | AGUUCACUCCUCUUGGCUGGG | 10946 | AGTTCACTCCTCTTGGCTGGG |
| 5282 | AGUUCCCCAGUCAGUCCAGUA | 10947 | AGTTCCCCAGTCAGTCCAGTA |
| 5283 | AGUUCGUGCAAAUAAUCUUUG | 10948 | AGTTCGTGCAAATAATCTTTG |
| 5284 | AGUUCUCGAUAUUCACGAUCA | 10949 | AGTTCTCGATATTCACGATCA |
| 5285 | AGUUCUUCCAUAGAAGGAAGA | 10950 | AGTTCTTCCATAGAAGGAAGA |
| 5286 | AGUUGACAUCGGAACCUGUGA | 10951 | AGTTGACATCGGAACCTGTGA |
| 5287 | AGUUGAUGCUGUUGAUGUUCU | 10952 | AGTTGATGCTGTTGATGTTCT |
| 5288 | AGUUGUAUUUCUGAAAUAGGG | 10953 | AGTTGTATTTCTGAAATAGGG |
| 5289 | AGUUUAGGGGUUUGGCUUAGA | 10954 | AGTTTAGGGGTTTGGCTTAGA |
| 5290 | AGUUUCAACCAAUAUACAAAG | 10955 | AGTTTCAACCAATATACAAAG |
| 5291 | AGUUUCCAUCAGAGCACUGGA | 10956 | AGTTTCCATCAGAGCACTGGA |
| 5292 | AGUUUGGAGUCAACCCAGUAG | 10957 | AGTTTGGAGTCAACCCAGTAG |
| 5293 | AGUUUGGUCUCGGUGCCACCA | 10958 | AGTTTGGTCTCGGTGCCACCA |
| 5294 | AGUUUUCCUCGUCAGAUUUGU | 10959 | AGTTTTCCTCGTCAGATTTGT |
| 5295 | AUAAAACAAAGCUCUGGCAGG | 10960 | ATAAAACAAAGCTCTGGCAGG |
| 5296 | AUAAAACAAGGCCGGCGAGGU | 10961 | ATAAAACAAGGCCGGCGAGGT |
| 5297 | AUAAAGAAGAGGCAUUUCAGA | 10962 | ATAAAGAAGAGGCATTTCAGA |
| 5298 | AUAAAGACGACAAUGGCAGUU | 10963 | ATAAAGACGACAATGGCAGTT |
| 5299 | AUAAAUAGAUUUUAUAUAUAU | 10964 | ATAAATAGATTTTATATATAT |
| 5300 | AUAAAUAUAUAAAACAAAGCU | 10965 | ATAAATATATAAAACAAAGCT |
| 5301 | AUAAAUAUUAAGGGUGACCAG | 10966 | ATAAATATTAAGGGTGACCAG |
| 5302 | AUAACAAAAAAUCCCCACUAU | 10967 | ATAACAAAAAATCCCCACTAT |
| 5303 | AUAACACAAAUGCCAAAUGUA | 10968 | ATAACACAAATGCCAAATGTA |
| 5304 | AUAACAGUUUCAACCAAUAUA | 10969 | ATAACAGTTTCAACCAATATA |
| 5305 | AUAACCCCCUACACAGGGCCC | 10970 | ATAACCCCCTACACAGGGCCC |
| 5306 | AUAACGGAGGGCGACUCGUGU | 10971 | ATAACGGAGGGCGACTCGTGT |
| 5307 | AUAACGUUUUCCUCUUCACGC | 10972 | ATAACGTTTTCCTCTTCACGC |
| 5308 | AUAAGUGAUAACAGUUUCAAC | 10973 | ATAAGTGATAACAGTTTCAAC |
| 5309 | AUAAUAACACAAAUGCCAAAU | 10974 | ATAATAACACAAATGCCAAAT |
| 5310 | AUAAUCAUAGCUCACGACAGC | 10975 | ATAATCATAGCTCACGACAGC |
| 5311 | AUAAUCUUUGUACAUAAAGAA | 10976 | ATAATCTTTGTACATAAAGAA |
| 5312 | AUACAAAGUGCAAACAUAACA | 10977 | ATACAAAGTGCAAACATAACA |
| 5313 | AUACAACGGGGACAUCAUUCU | 10978 | ATACAACGGGGACATCATTCT |
| 5314 | AUACAGCAACCAGGGUUUGCA | 10979 | ATACAGCAACCAGGGTTTGCA |
| 5315 | AUACAGUGGUUUAAAAAGUGA | 10980 | ATACAGTGGTTTAAAAAGTGA |
| 5316 | AUACAUACAACGGGGACAUCA | 10981 | ATACATACAACGGGGACATCA |
| 5317 | AUACCCAUCAACGACAAGAUU | 10982 | ATACCCATCAACGACAAGATT |
| 5318 | AUACUGGCAGCCGCCAUUGCU | 10983 | ATACTGGCAGCCGCCATTGCT |
| 5319 | AUACUUUGUCCUCAAAGACGG | 10984 | ATACTTTGTCCTCAAAGACGG |
| 5320 | AUAGAAGAGGUAAACACGUUG | 10985 | ATAGAAGAGGTAAACACGTTG |
| 5321 | AUAGAAGGAAGACCCCCAGGC | 10986 | ATAGAAGGAAGACCCCCAGGC |
| 5322 | AUAGAAGUGGAAGCACUAGGU | 10987 | ATAGAAGTGGAAGCACTAGGT |
| 5323 | AUAGACGGGGUUGUCAAAGUU | 10988 | ATAGACGGGGTTGTCAAAGTT |
| 5324 | AUAGAUUUUAUAUAUAUGUGU | 10989 | ATAGATTTTATATATATGTGT |
| 5325 | AUAGCUCACGACAGCCUCAAA | 10990 | ATAGCTCACGACAGCCTCAAA |
| 5326 | AUAGGAAGAGACGCCGUGGGC | 10991 | ATAGGAAGAGACGCCGTGGGC |
| 5327 | AUAGGGUCUUCAUCUGUUGCC | 10992 | ATAGGGTCTTCATCTGTTGCC |
| 5328 | AUAGUCACUGAACAAAUACAG | 10993 | ATAGTCACTGAACAAATACAG |
| 5329 | AUAGUUGUAUUUCUGAAAUAG | 10994 | ATAGTTGTATTTCTGAAATAG |
| 5330 | AUAUAAAACAAAGCUCUGGCA | 10995 | ATATAAAACAAAGCTCTGGCA |
| 5331 | AUAUAAGUGAUAACAGUUUCA | 10996 | ATATAAGTGATAACAGTTTCA |
| 5332 | AUAUACAAAGUGCAAACAUAA | 10997 | ATATACAAAGTGCAAACATAA |
| 5333 | AUAUAUAAAACAAAGCUCUGG | 10998 | ATATATAAAACAAAGCTCTGG |
| 5334 | AUAUAUAAGUGAUAACAGUUU | 10999 | ATATATAAGTGATAACAGTTT |
| 5335 | AUAUAUAUAAGUGAUAACAGU | 11000 | ATATATATAAGTGATAACAGT |
| 5336 | AUAUAUAUAUAAGUGAUAACA | 11001 | ATATATATATAAGTGATAACA |
| 5337 | AUAUAUAUAUAUAAGUGAUAA | 11002 | ATATATATATATAAGTGATAA |
| 5338 | AUAUAUAUAUAUAUAAGUGAU | 11003 | ATATATATATATATAAGTGAT |
| 5339 | AUAUAUAUGUGUGUAUAUAUA | 11004 | ATATATATGTGTGTATATATA |
| 5340 | AUAUAUGUGUGUAUAUAUAUA | 11005 | ATATATGTGTGTATATATATA |
| 5341 | AUAUCCUCUGGGGACAGUAGG | 11006 | ATATCCTCTGGGGACAGTAGG |
| 5342 | AUAUCGCACUCUUUGAUGGGU | 11007 | ATATCGCACTCTTTGATGGGT |
| 5343 | AUAUCUGUCCAAAAUACUUUG | 11008 | ATATCTGTCCAAAATACTTTG |
| 5344 | AUAUCUUCGCAUCUUCGCUGG | 11009 | ATATCTTCGCATCTTCGCTGG |
| 5345 | AUAUGUGUGUAUAUAUAUAUA | 11010 | ATATGTGTGTATATATATATA |
| 5346 | AUAUUAAGGGUGACCAGUGAC | 11011 | ATATTAAGGGTGACCAGTGAC |
| 5347 | AUAUUCACGAUCACGGCUUUG | 11012 | ATATTCACGATCACGGCTTTG |
| 5348 | AUAUUCCCGGUCACACUGCCG | 11013 | ATATTCCCGGTCACACTGCCG |
| 5349 | AUCAACGACAAGAUUGGGGAA | 11014 | ATCAACGACAAGATTGGGGAA |
| 5350 | AUCACAGCGCCAGCUGGAGUG | 11015 | ATCACAGCGCCAGCTGGAGTG |
| 5351 | AUCACAGGCACGUGCCACCGU | 11016 | ATCACAGGCACGTGCCACCGT |
| 5352 | AUCACAGUAAGACAUUCAGGC | 11017 | ATCACAGTAAGACATTCAGGC |
| 5353 | AUCACGACCUGCUGUGUCCUA | 11018 | ATCACGACCTGCTGTGTCCTA |
| 5354 | AUCACGGCUUUGAAGUCCCGG | 11019 | ATCACGGCTTTGAAGTCCCGG |
| 5355 | AUCACGGUUCCCUGCACUGGG | 11020 | ATCACGGTTCCCTGCACTGGG |
| 5356 | AUCAGAGCACUGGAAUUCGUC | 11021 | ATCAGAGCACTGGAATTCGTC |
| 5357 | AUCAGAGCCAUCCUGGCACUC | 11022 | ATCAGAGCCATCCTGGCACTC |
| 5358 | AUCAGUGCAACAGUAACACGG | 11023 | ATCAGTGCAACAGTAACACGG |
| 5359 | AUCAUAGCUCACGACAGCCUC | 11024 | ATCATAGCTCACGACAGCCTC |
| 5360 | AUCAUGGCUCACUGCAACCUC | 11025 | ATCATGGCTCACTGCAACCTC |
| 5361 | AUCAUUCUCCCAAAAAGCGUU | 11026 | ATCATTCTCCCAAAAAGCGTT |
| 5362 | AUCAUUCUCUGGGACAGGUCA | 11027 | ATCATTCTCTGGGACAGGTCA |
| 5363 | AUCAUUUCCGACGCCAUGAAU | 11028 | ATCATTTCCGACGCCATGAAT |
| 5364 | AUCAUUUGGUGAAUGAGUUUG | 11029 | ATCATTTGGTGAATGAGTTTG |
| 5365 | AUCCACCACGAUGGCCCUUGG | 11030 | ATCCACCACGATGGCCCTTGG |
| 5366 | AUCCACCCGCCUCGGCCUCCC | 11031 | ATCCACCCGCCTCGGCCTCCC |
| 5367 | AUCCAGACUGGAGGAUUUAUU | 11032 | ATCCAGACTGGAGGATTTATT |
| 5368 | AUCCAGCUCAGCCUCCCAAAG | 11033 | ATCCAGCTCAGCCTCCCAAAG |
| 5369 | AUCCAGUCCACAGCCAGCCCG | 11034 | ATCCAGTCCACAGCCAGCCCG |
| 5370 | AUCCCAACACACACGACAGAA | 11035 | ATCCCAACACACACGACAGAA |
| 5371 | AUCCCAACCCAAGCCAUUGCA | 11036 | ATCCCAACCCAAGCCATTGCA |
| 5372 | AUCCCAUCCCAACACACACGA | 11037 | ATCCCATCCCAACACACACGA |
| 5373 | AUCCCCACUAUCUGUACAGGG | 11038 | ATCCCCACTATCTGTACAGGG |
| 5374 | AUCCCCUCCCCUUUCAUCUUC | 11039 | ATCCCCTCCCCTTTCATCTTC |
| 5375 | AUCCCUUGUGACAUCUUCACG | 11040 | ATCCCTTGTGACATCTTCACG |
| 5376 | AUCCCUUUCCUGGCUUAAGGA | 11041 | ATCCCTTTCCTGGCTTAAGGA |
| 5377 | AUCCGAGCCAUCUUCGCAGUC | 11042 | ATCCGAGCCATCTTCGCAGTC |
| 5378 | AUCCGCAACAGAGACAGUGCC | 11043 | ATCCGCAACAGAGACAGTGCC |
| 5379 | AUCCUCCAAGAUGGUCUUCCG | 11044 | ATCCTCCAAGATGGTCTTCCG |
| 5380 | AUCCUCCAGACUGACCAUCGA | 11045 | ATCCTCCAGACTGACCATCGA |
| 5381 | AUCCUCCAGACUGACCAUCUG | 11046 | ATCCTCCAGACTGACCATCTG |
| 5382 | AUCCUCCCACCUCAGCCUCGC | 11047 | ATCCTCCCACCTCAGCCTCGC |
| 5383 | AUCCUCCUGCCUCAGCCUCCC | 11048 | ATCCTCCTGCCTCAGCCTCCC |
| 5384 | AUCCUCUGGGGACAGUAGGUU | 11049 | ATCCTCTGGGGACAGTAGGTT |
| 5385 | AUCCUCUGUGGUCUUCUGAUA | 11050 | ATCCTCTGTGGTCTTCTGATA |
| 5386 | AUCCUGACACUCAUCGAUAUC | 11051 | ATCCTGACACTCATCGATATC |
| 5387 | AUCCUGGCACUCAGCGCUGCC | 11052 | ATCCTGGCACTCAGCGCTGCC |
| 5388 | AUCCUGGUCCCCCCGGGCCUG | 11053 | ATCCTGGTCCCCCCGGGCCTG |
| 5389 | AUCCUUCACGAGGAAAGGAAG | 11054 | ATCCTTCACGAGGAAAGGAAG |
| 5390 | AUCGAGGGGUAGCUGUAGCCG | 11055 | ATCGAGGGGTAGCTGTAGCCG |
| 5391 | AUCGAUAUCGCACUCUUUGAU | 11056 | ATCGATATCGCACTCTTTGAT |
| 5392 | AUCGAUAUCUUCGCAUCUUCG | 11057 | ATCGATATCTTCGCATCTTCG |
| 5393 | AUCGAUGCUUGAGAUGGAGUG | 11058 | ATCGATGCTTGAGATGGAGTG |
| 5394 | AUCGCACCUCCAGAACUGAGG | 11059 | ATCGCACCTCCAGAACTGAGG |
| 5395 | AUCGCACUCUUUGAUGGGUUC | 11060 | ATCGCACTCTTTGATGGGTTC |
| 5396 | AUCGCAGACCCACUUGUAGGA | 11061 | ATCGCAGACCCACTTGTAGGA |
| 5397 | AUCGCUCAUGUCCUUGCAGUC | 11062 | ATCGCTCATGTCCTTGCAGTC |
| 5398 | AUCGGAACCUGUGAGGCGGUU | 11063 | ATCGGAACCTGTGAGGCGGTT |
| 5399 | AUCGGGGCUGGUGGGGCGAGG | 11064 | ATCGGGGCTGGTGGGGCGAGG |
| 5400 | AUCGUGGCAGCGAAACUCGUC | 11065 | ATCGTGGCAGCGAAACTCGTC |
| 5401 | AUCUAGGGUGAUGCCAUUGGG | 11066 | ATCTAGGGTGATGCCATTGGG |
| 5402 | AUCUCCACCGUGGUGAGCCCA | 11067 | ATCTCCACCGTGGTGAGCCCA |
| 5403 | AUCUCCCAGAAGCCACUCAUA | 11068 | ATCTCCCAGAAGCCACTCATA |
| 5404 | AUCUCCUGACCUCAUGAUCCA | 11069 | ATCTCCTGACCTCATGATCCA |
| 5405 | AUCUCGCUUUGUUGCUCAGGC | 11070 | ATCTCGCTTTGTTGCTCAGGC |
| 5406 | AUCUCGGCUCACUGCAAGCUC | 11071 | ATCTCGGCTCACTGCAAGCTC |
| 5407 | AUCUCGGCUGCAGACCAAGGA | 11072 | ATCTCGGCTGCAGACCAAGGA |
| 5408 | AUCUGACCAGUCCCGGCAGUC | 11073 | ATCTGACCAGTCCCGGCAGTC |
| 5409 | AUCUGCGGGGCAGGGAGGCAC | 11074 | ATCTGCGGGGCAGGGAGGCAC |
| 5410 | AUCUGCUGUUGUGUGUUGAAA | 11075 | ATCTGCTGTTGTGTGTTGAAA |
| 5411 | AUCUGUACAGGGACGCAUUUA | 11076 | ATCTGTACAGGGACGCATTTA |
| 5412 | AUCUGUCCAAAAUACUUUGUC | 11077 | ATCTGTCCAAAATACTTTGTC |
| 5413 | AUCUGUCGCCCACGUGGCUGA | 11078 | ATCTGTCGCCCACGTGGCTGA |
| 5414 | AUCUGUCGCCCACUGCAGUCC | 11079 | ATCTGTCGCCCACTGCAGTCC |
| 5415 | AUCUGUCUCGAGGGGUAGCUG | 11080 | ATCTGTCTCGAGGGGTAGCTG |
| 5416 | AUCUGUUGCCCAGGCUGGAGU | 11081 | ATCTGTTGCCCAGGCTGGAGT |
| 5417 | AUCUUAAGGUCAUUGCAGACG | 11082 | ATCTTAAGGTCATTGCAGACG |
| 5418 | AUCUUCACGCGGGAGUCUGAC | 11083 | ATCTTCACGCGGGAGTCTGAC |
| 5419 | AUCUUCCAUGUUUGAGGAUUG | 11084 | ATCTTCCATGTTTGAGGATTG |
| 5420 | AUCUUCCUGACCUCGUGCCGG | 11085 | ATCTTCCTGACCTCGTGCCGG |
| 5421 | AUCUUCGCAGUCGGGGUCGUU | 11086 | ATCTTCGCAGTCGGGGTCGTT |
| 5422 | AUCUUCGCAUCUUCGCUGGGC | 11087 | ATCTTCGCATCTTCGCTGGGC |
| 5423 | AUCUUCGCUGGGCCACCAGCU | 11088 | ATCTTCGCTGGGCCACCAGCT |
| 5424 | AUCUUGGCGGGAGUUCCCCAG | 11089 | ATCTTGGCGGGAGTTCCCCAG |
| 5425 | AUCUUUGUACAUAAAGAAGAG | 11090 | ATCTTTGTACATAAAGAAGAG |
| 5426 | AUGAACAGGAUCCACCACGAU | 11091 | ATGAACAGGATCCACCACGAT |
| 5427 | AUGAAGCCAUGAACAGGAUCC | 11092 | ATGAAGCCATGAACAGGATCC |
| 5428 | AUGAAUAAAUAUAUAAAACAA | 11093 | ATGAATAAATATATAAAACAA |
| 5429 | AUGAAUCCCUUUCCUGGCUUA | 11094 | ATGAATCCCTTTCCTGGCTTA |
| 5430 | AUGACGGUGUCAUAGGAAGAG | 11095 | ATGACGGTGTCATAGGAAGAG |
| 5431 | AUGAGGCAGGGCCAGGGGGUC | 11096 | ATGAGGCAGGGCCAGGGGGTC |
| 5432 | AUGAGGCUGGUGUACUCGCUC | 11097 | ATGAGGCTGGTGTACTCGCTC |
| 5433 | AUGAGUUUGGUCUCGGUGCCA | 11098 | ATGAGTTTGGTCTCGGTGCCA |
| 5434 | AUGAUAUCUGUCCAAAAUACU | 11099 | ATGATATCTGTCCAAAATACT |
| 5435 | AUGAUCCACCCGCCUCGGCCU | 11100 | ATGATCCACCCGCCTCGGCCT |
| 5436 | AUGAUUCGGGGGUGACAGGGC | 11101 | ATGATTCGGGGGTGACAGGGC |
| 5437 | AUGCACCAUGCAUGGUUUUUU | 11102 | ATGCACCATGCATGGTTTTTT |
| 5438 | AUGCACUCGCCACUUAGGCAG | 11103 | ATGCACTCGCCACTTAGGCAG |
| 5439 | AUGCACUUCCCAUCGUGGCAG | 11104 | ATGCACTTCCCATCGTGGCAG |
| 5440 | AUGCAGCGGUUGACACGGCCC | 11105 | ATGCAGCGGTTGACACGGCCC |
| 5441 | AUGCAGGUGGAGCUGUUGCAC | 11106 | ATGCAGGTGGAGCTGTTGCAC |
| 5442 | AUGCAGUUUCCAUCAGAGCAC | 11107 | ATGCAGTTTCCATCAGAGCAC |
| 5443 | AUGCAUGGUUUUUUUUUGUUU | 11108 | ATGCATGGTTTTTTTTTGTTT |
| 5444 | AUGCAUUCGCCGCUGUGACAC | 11109 | ATGCATTCGCCGCTGTGACAC |
| 5445 | AUGCAUUUCCCGUCUUGGCAC | 11110 | ATGCATTTCCCGTCTTGGCAC |
| 5446 | AUGCCAAAUGUACACAGUGUA | 11111 | ATGCCAAATGTACACAGTGTA |
| 5447 | AUGCCAUUGGGCCACUGAAUG | 11112 | ATGCCATTGGGCCACTGAATG |
| 5448 | AUGCCGUCCGGGCAGGCGCAG | 11113 | ATGCCGTCCGGGCAGGCGCAG |
| 5449 | AUGCCUGAGCUCAAACCAUCC | 11114 | ATGCCTGAGCTCAAACCATCC |
| 5450 | AUGCCUGGCCAGAGGCCAUGG | 11115 | ATGCCTGGCCAGAGGCCATGG |
| 5451 | AUGCUCGCAGCCUCUGCCAGG | 11116 | ATGCTCGCAGCCTCTGCCAGG |
| 5452 | AUGCUGUUGAUGUUCUUAAGC | 11117 | ATGCTGTTGATGTTCTTAAGC |
| 5453 | AUGCUUGAGAUGGAGUGAAGU | 11118 | ATGCTTGAGATGGAGTGAAGT |
| 5454 | AUGCUUUGGUCUUCUCUGUCU | 11119 | ATGCTTTGGTCTTCTCTGTCT |
| 5455 | AUGGAAGUGGGUAGGGGUCGG | 11120 | ATGGAAGTGGGTAGGGGTCGG |
| 5456 | AUGGACAGAGCCCUCACGCUA | 11121 | ATGGACAGAGCCCTCACGCTA |
| 5457 | AUGGAGCCCACAGCCUUGCAG | 11122 | ATGGAGCCCACAGCCTTGCAG |
| 5458 | AUGGAGGUGUCAUCCUGGUCC | 11123 | ATGGAGGTGTCATCCTGGTCC |
| 5459 | AUGGAGUGAAGUUUGGAGUCA | 11124 | ATGGAGTGAAGTTTGGAGTCA |
| 5460 | AUGGAUGCAGUUUCCAUCAGA | 11125 | ATGGATGCAGTTTCCATCAGA |
| 5461 | AUGGCAGUUCUCGAUAUUCAC | 11126 | ATGGCAGTTCTCGATATTCAC |
| 5462 | AUGGCCCUUGGCUUGGAGCCG | 11127 | ATGGCCCTTGGCTTGGAGCCG |
| 5463 | AUGGCUCACUGCAACCUCCAC | 11128 | ATGGCTCACTGCAACCTCCAC |
| 5464 | AUGGCUUCGUUGAUGAUAUCU | 11129 | ATGGCTTCGTTGATGATATCT |
| 5465 | AUGGCUUGGAGGCAUUUGCAU | 11130 | ATGGCTTGGAGGCATTTGCAT |
| 5466 | AUGGGAUCUCGCUUUGUUGCU | 11131 | ATGGGATCTCGCTTTGTTGCT |
| 5467 | AUGGGCACCAGGCUGGUGUCC | 11132 | ATGGGCACCAGGCTGGTGTCC |
| 5468 | AUGGGCACUGUCCGAAGCCUG | 11133 | ATGGGCACTGTCCGAAGCCTG |
| 5469 | AUGGGCUGCUGAUGCACCAUG | 11134 | ATGGGCTGCTGATGCACCATG |
| 5470 | AUGGGGAGGACAAUGGACAGA | 11135 | ATGGGGAGGACAATGGACAGA |
| 5471 | AUGGGGUCUUACUAUGUUGCC | 11136 | ATGGGGTCTTACTATGTTGCC |
| 5472 | AUGGGUUCAUCUGACCAGUCC | 11137 | ATGGGTTCATCTGACCAGTCC |
| 5473 | AUGGUCUCGAUCUCCUGACCU | 11138 | ATGGTCTCGATCTCCTGACCT |
| 5474 | AUGGUCUUCCGGUUGCCCCCG | 11139 | ATGGTCTTCCGGTTGCCCCCG |
| 5475 | AUGGUUUUUUUUUGUUUUUUU | 11140 | ATGGTTTTTTTTTGTTTTTTT |
| 5476 | AUGUACACAGUGUACAACUCU | 11141 | ATGTACACAGTGTACAACTCT |
| 5477 | AUGUCCACACCAUUCAGGCCC | 11142 | ATGTCCACACCATTCAGGCCC |
| 5478 | AUGUCCCUGGCCAGCAGCAUG | 11143 | ATGTCCCTGGCCAGCAGCATG |
| 5479 | AUGUCCUUGCAGUCAUAUUCC | 11144 | ATGTCCTTGCAGTCATATTCC |
| 5480 | AUGUCGCGGAGGCGGCUCCGG | 11145 | ATGTCGCGGAGGCGGCTCCGG |
| 5481 | AUGUCUCCUGGGUGGCCACUG | 11146 | ATGTCTCCTGGGTGGCCACTG |
| 5482 | AUGUCUCUGCUGAUGACGGUG | 11147 | ATGTCTCTGCTGATGACGGTG |
| 5483 | AUGUGGACCUCAUCCUCUGUG | 11148 | ATGTGGACCTCATCCTCTGTG |
| 5484 | AUGUGUGUAUAUAUAUAUAUA | 11149 | ATGTGTGTATATATATATATA |
| 5485 | AUGUUCACGCCACGUCAUCCU | 11150 | ATGTTCACGCCACGTCATCCT |
| 5486 | AUGUUCUUAAGCCGCCAGUUC | 11151 | ATGTTCTTAAGCCGCCAGTTC |
| 5487 | AUGUUGCAGACUUUGUCCAGG | 11152 | ATGTTGCAGACTTTGTCCAGG |
| 5488 | AUGUUGCCCAGGCUGGAAAGC | 11153 | ATGTTGCCCAGGCTGGAAAGC |
| 5489 | AUGUUGCUGUGGAUCCAGUCC | 11154 | ATGTTGCTGTGGATCCAGTCC |
| 5490 | AUGUUUGAGGAUUGUGUCACG | 11155 | ATGTTTGAGGATTGTGTCACG |
| 5491 | AUGUUUUAAACACAUACCCAU | 11156 | ATGTTTTAAACACATACCCAT |
| 5492 | AUGUUUUCAGUCACCAGCGAG | 11157 | ATGTTTTCAGTCACCAGCGAG |
| 5493 | AUUAACGCAGCCAACUUCAUC | 11158 | ATTAACGCAGCCAACTTCATC |
| 5494 | AUUAAGGGUGACCAGUGACUC | 11159 | ATTAAGGGTGACCAGTGACTC |
| 5495 | AUUACAGGCGUGAGCCACUGC | 11160 | ATTACAGGCGTGAGCCACTGC |
| 5496 | AUUACAGGCGUGAGGCACCUG | 11161 | ATTACAGGCGTGAGGCACCTG |
| 5497 | AUUCACGAUCACGGCUUUGAA | 11162 | ATTCACGATCACGGCTTTGAA |
| 5498 | AUUCAGCCAGAUCAUUUCCGA | 11163 | ATTCAGCCAGATCATTTCCGA |
| 5499 | AUUCAGGCCCCCUUUCUUGAU | 11164 | ATTCAGGCCCCCTTTCTTGAT |
| 5500 | AUUCAGGCUACAAAAACCUUC | 11165 | ATTCAGGCTACAAAAACCTTC |
| 5501 | AUUCAUUGACACGGGCUUUCC | 11166 | ATTCATTGACACGGGCTTTCC |
| 5502 | AUUCAUUUUUUAAGAGAUGGG | 11167 | ATTCATTTTTTAAGAGATGGG |
| 5503 | AUUCCCGGUCACACUGCCGGC | 11168 | ATTCCCGGTCACACTGCCGGC |
| 5504 | AUUCGCCGCUGUGACACUUGA | 11169 | ATTCGCCGCTGTGACACTTGA |
| 5505 | AUUCGGGGGUGACAGGGCAAA | 11170 | ATTCGGGGGTGACAGGGCAAA |
| 5506 | AUUCGUCAGGGCGACAGGUGG | 11171 | ATTCGTCAGGGCGACAGGTGG |
| 5507 | AUUCGUUGGUCCCGCACUCUU | 11172 | ATTCGTTGGTCCCGCACTCTT |
| 5508 | AUUCUAUUGCUGGCCACCUCC | 11173 | ATTCTATTGCTGGCCACCTCC |
| 5509 | AUUCUCCCAAAAAGCGUUGCA | 11174 | ATTCTCCCAAAAAGCGTTGCA |
| 5510 | AUUCUCCUGCCUCAGCCUCCC | 11175 | ATTCTCCTGCCTCAGCCTCCC |
| 5511 | AUUCUCUGGGACAGGUCAGAC | 11176 | ATTCTCTGGGACAGGTCAGAC |
| 5512 | AUUCUGAGGCAACGUUUCAAC | 11177 | ATTCTGAGGCAACGTTTCAAC |
| 5513 | AUUGACACGGGCUUUCCCUGG | 11178 | ATTGACACGGGCTTTCCCTGG |
| 5514 | AUUGAUCACAGUAAGACAUUC | 11179 | ATTGATCACAGTAAGACATTC |
| 5515 | AUUGCAGACGUGGGAACAGCC | 11180 | ATTGCAGACGTGGGAACAGCC |
| 5516 | AUUGCAUGGGCACUGUCCGAA | 11181 | ATTGCATGGGCACTGTCCGAA |
| 5517 | AUUGCCAAUCCCUUGUGACAU | 11182 | ATTGCCAATCCCTTGTGACAT |
| 5518 | AUUGCUCAGGGUGGUCCUCUC | 11183 | ATTGCTCAGGGTGGTCCTCTC |
| 5519 | AUUGCUGGCCACCUCCGUGUC | 11184 | ATTGCTGGCCACCTCCGTGTC |
| 5520 | AUUGGGCCACUGAAUGUUUUC | 11185 | ATTGGGCCACTGAATGTTTTC |
| 5521 | AUUGGGGAAGUGAAUGGCUUG | 11186 | ATTGGGGAAGTGAATGGCTTG |
| 5522 | AUUGGUGGAUGAGGCAGGGCC | 11187 | ATTGGTGGATGAGGCAGGGCC |
| 5523 | AUUGUCACUAUCUCCACCGUG | 11188 | ATTGTCACTATCTCCACCGTG |
| 5524 | AUUGUGUCACGGUGGAGAGAA | 11189 | ATTGTGTCACGGTGGAGAGAA |
| 5525 | AUUUAAGAAAUUUAAUUGAUC | 11190 | ATTTAAGAAATTTAATTGATC |
| 5526 | AUUUAAUUGAUCACAGUAAGA | 11191 | ATTTAATTGATCACAGTAAGA |
| 5527 | AUUUACGUGCUCCGAAACCAG | 11192 | ATTTACGTGCTCCGAAACCAG |
| 5528 | AUUUAUUUAUUUUUUUAUAGU | 11193 | ATTTATTTATTTTTTTATAGT |
| 5529 | AUUUAUUUUUUUAUAGUUGUA | 11194 | ATTTATTTTTTTATAGTTGTA |
| 5530 | AUUUCAGAAAGAACCUGAAGU | 11195 | ATTTCAGAAAGAACCTGAAGT |
| 5531 | AUUUCAGAGGCAAUAACCCCC | 11196 | ATTTCAGAGGCAATAACCCCC |
| 5532 | AUUUCCAGCCCCAGGGCCCCA | 11197 | ATTTCCAGCCCCAGGGCCCCA |
| 5533 | AUUUCCCGUCUUGGCACUGGA | 11198 | ATTTCCCGTCTTGGCACTGGA |
| 5534 | AUUUCCGACGCCAUGAAUCCC | 11199 | ATTTCCGACGCCATGAATCCC |
| 5535 | AUUUCCUCUGCCAGCAACGUC | 11200 | ATTTCCTCTGCCAGCAACGTC |
| 5536 | AUUUCUGAAAUAGGGUCUUCA | 11201 | ATTTCTGAAATAGGGTCTTCA |
| 5537 | AUUUGCAGGUGACAGACAAGC | 11202 | ATTTGCAGGTGACAGACAAGC |
| 5538 | AUUUGCAUAGAAGUGGAAGCA | 11203 | ATTTGCATAGAAGTGGAAGCA |
| 5539 | AUUUGGUGAAUGAGUUUGGUC | 11204 | ATTTGGTGAATGAGTTTGGTC |
| 5540 | AUUUGUCCUUGCAGUCGGGGC | 11205 | ATTTGTCCTTGCAGTCGGGGC |
| 5541 | AUUUUAUAUAUAUGUGUGUAU | 11206 | ATTTTATATATATGTGTGTAT |
| 5542 | AUUUUUAACUUUUUGGUUUUU | 11207 | ATTTTTAACTTTTTGGTTTTT |
| 5543 | AUUUUUAGUAGAGACGGGGUU | 11208 | ATTTTTAGTAGAGACGGGGTT |
| 5544 | AUUUUUUAAGAGAUGGGGUCU | 11209 | ATTTTTTAAGAGATGGGGTCT |
| 5545 | AUUUUUUGUAUUUUUAGUAGA | 11210 | ATTTTTTGTATTTTTAGTAGA |
| 5546 | AUUUUUUUAUAGUUGUAUUUC | 11211 | ATTTTTTTATAGTTGTATTTC |
| 5547 | CAAAAAAUCCCCACUAUCUGU | 11212 | CAAAAAATCCCCACTATCTGT |
| 5548 | CAAAAACCUUCUAUACAGUGG | 11213 | CAAAAACCTTCTATACAGTGG |
| 5549 | CAAAAAGCGUUGCACACAGUC | 11214 | CAAAAAGCGTTGCACACAGTC |
| 5550 | CAAAAAUAAAUAGAUUUUAUA | 11215 | CAAAAATAAATAGATTTTATA |
| 5551 | CAAAACUUCCUGGAGAGAAAU | 11216 | CAAAACTTCCTGGAGAGAAAT |
| 5552 | CAAAAUAAUAACACAAAUGCC | 11217 | CAAAATAATAACACAAATGCC |
| 5553 | CAAAAUACUUUGUCCUCAAAG | 11218 | CAAAATACTTTGTCCTCAAAG |
| 5554 | CAAAAUCCCAACCCAAGCCAU | 11219 | CAAAATCCCAACCCAAGCCAT |
| 5555 | CAAACAUAACAAAAAAUCCCC | 11220 | CAAACATAACAAAAAATCCCC |
| 5556 | CAAACCAUCCUCCCACCUCAG | 11221 | CAAACCATCCTCCCACCTCAG |
| 5557 | CAAACCCACCUCGAAAGACAC | 11222 | CAAACCCACCTCGAAAGACAC |
| 5558 | CAAACGAUCCAGACUGGAGGA | 11223 | CAAACGATCCAGACTGGAGGA |
| 5559 | CAAAGACGGCCAAGGAGAAGG | 11224 | CAAAGACGGCCAAGGAGAAGG |
| 5560 | CAAAGCUCUGGCAGGCAAUGC | 11225 | CAAAGCTCTGGCAGGCAATGC |
| 5561 | CAAAGGAAGACGAGGAGCACG | 11226 | CAAAGGAAGACGAGGAGCACG |
| 5562 | CAAAGGAAGACGAGGAGCACU | 11227 | CAAAGGAAGACGAGGAGCACT |
| 5563 | CAAAGGCUAACCUGGCUGUCU | 11228 | CAAAGGCTAACCTGGCTGTCT |
| 5564 | CAAAGUGCAAACAUAACAAAA | 11229 | CAAAGTGCAAACATAACAAAA |
| 5565 | CAAAGUGCUGGGAUUACAGGC | 11230 | CAAAGTGCTGGGATTACAGGC |
| 5566 | CAAAGUUGAUGCUGUUGAUGU | 11231 | CAAAGTTGATGCTGTTGATGT |
| 5567 | CAAAUAAUCUUUGUACAUAAA | 11232 | CAAATAATCTTTGTACATAAA |
| 5568 | CAAAUACAGCAACCAGGGUUU | 11233 | CAAATACAGCAACCAGGGTTT |
| 5569 | CAAAUGCCAAAUGUACACAGU | 11234 | CAAATGCCAAATGTACACAGT |
| 5570 | CAAAUGCCUGAGCUCAAACCA | 11235 | CAAATGCCTGAGCTCAAACCA |
| 5571 | CAAAUGUACACAGUGUACAAC | 11236 | CAAATGTACACAGTGTACAAC |
| 5572 | CAAAUGUGGACCUCAUCCUCU | 11237 | CAAATGTGGACCTCATCCTCT |
| 5573 | CAAAUUCAUUUUUUAAGAGAU | 11238 | CAAATTCATTTTTTAAGAGAT |
| 5574 | CAACAAGUUGACAUCGGAACC | 11239 | CAACAAGTTGACATCGGAACC |
| 5575 | CAACACACACGACAGAAAACA | 11240 | CAACACACACGACAGAAAACA |
| 5576 | CAACAGAGACAGUGCCCAGGA | 11241 | CAACAGAGACAGTGCCCAGGA |
| 5577 | CAACAGUAACACGGCGAUUUC | 11242 | CAACAGTAACACGGCGATTTC |
| 5578 | CAACCAAUAUACAAAGUGCAA | 11243 | CAACCAATATACAAAGTGCAA |
| 5579 | CAACCAGGGUUUGCAAAAAUA | 11244 | CAACCAGGGTTTGCAAAAATA |
| 5580 | CAACCCAAGCCAUUGCAUGGG | 11245 | CAACCCAAGCCATTGCATGGG |
| 5581 | CAACCCAGUAGAGGCGGCCAC | 11246 | CAACCCAGTAGAGGCGGCCAC |
| 5582 | CAACCUCCACCUCCUGGGCUC | 11247 | CAACCTCCACCTCCTGGGCTC |
| 5583 | CAACCUCGUAAGGAACCGAGG | 11248 | CAACCTCGTAAGGAACCGAGG |
| 5584 | CAACCUGCCCCUCUCUGUCCC | 11249 | CAACCTGCCCCTCTCTGTCCC |
| 5585 | CAACGACAAGAUUGGGGAAGU | 11250 | CAACGACAAGATTGGGGAAGT |
| 5586 | CAACGGGGACAUCAUUCUCCC | 11251 | CAACGGGGACATCATTCTCCC |
| 5587 | CAACGUCGCCCAGAGCUUGGU | 11252 | CAACGTCGCCCAGAGCTTGGT |
| 5588 | CAACGUUUCAACCUCGUAAGG | 11253 | CAACGTTTCAACCTCGTAAGG |
| 5589 | CAACUCCUGAACUCAAGUGAU | 11254 | CAACTCCTGAACTCAAGTGAT |
| 5590 | CAACUCUGAACUGAGAAAGUG | 11255 | CAACTCTGAACTGAGAAAGTG |
| 5591 | CAACUUCAUCGCUCAUGUCCU | 11256 | CAACTTCATCGCTCATGTCCT |
| 5592 | CAAGAUGGUCUUCCGGUUGCC | 11257 | CAAGATGGTCTTCCGGTTGCC |
| 5593 | CAAGAUUGGGGAAGUGAAUGG | 11258 | CAAGATTGGGGAAGTGAATGG |
| 5594 | CAAGCACGUCUCCUGGGACUC | 11259 | CAAGCACGTCTCCTGGGACTC |
| 5595 | CAAGCAGUCCCGGUCUGAGUC | 11260 | CAAGCAGTCCCGGTCTGAGTC |
| 5596 | CAAGCAUUCGUUGGUCCCGCA | 11261 | CAAGCATTCGTTGGTCCCGCA |
| 5597 | CAAGCCAUUGCAUGGGCACUG | 11262 | CAAGCCATTGCATGGGCACTG |
| 5598 | CAAGCUCCGCUUCCCGGGUUC | 11263 | CAAGCTCCGCTTCCCGGGTTC |
| 5599 | CAAGCUGGGUGCUGCAGAUCA | 11264 | CAAGCTGGGTGCTGCAGATCA |
| 5600 | CAAGGAGAAGGGGUGGGCCAG | 11265 | CAAGGAGAAGGGGTGGGCCAG |
| 5601 | CAAGGAGACCACGGGAAUGGA | 11266 | CAAGGAGACCACGGGAATGGA |
| 5602 | CAAGGAGGGGGGGGGAGAUUC | 11267 | CAAGGAGGGGGGGGGAGATTC |
| 5603 | CAAGGCCGGCGAGGUCUCAGG | 11268 | CAAGGCCGGCGAGGTCTCAGG |
| 5604 | CAAGGCGACGGUCCAGCGCAA | 11269 | CAAGGCGACGGTCCAGCGCAA |
| 5605 | CAAGGCUUGCAUAGAAGAGGU | 11270 | CAAGGCTTGCATAGAAGAGGT |
| 5606 | CAAGGUAACCGGGUGUCUCAG | 11271 | CAAGGTAACCGGGTGTCTCAG |
| 5607 | CAAGGUGGGGACGGAGGUGUC | 11272 | CAAGGTGGGGACGGAGGTGTC |
| 5608 | CAAGUAGCUGGGAUCACAGGC | 11273 | CAAGTAGCTGGGATCACAGGC |
| 5609 | CAAGUGAUCCAGCUCAGCCUC | 11274 | CAAGTGATCCAGCTCAGCCTC |
| 5610 | CAAGUUGACAUCGGAACCUGU | 11275 | CAAGTTGACATCGGAACCTGT |
| 5611 | CAAUAACCCCCUACACAGGGC | 11276 | CAATAACCCCCTACACAGGGC |
| 5612 | CAAUAUACAAAGUGCAAACAU | 11277 | CAATATACAAAGTGCAAACAT |
| 5613 | CAAUCCCUUGUGACAUCUUCA | 11278 | CAATCCCTTGTGACATCTTCA |
| 5614 | CAAUCUCGGCUCACUGCAAGC | 11279 | CAATCTCGGCTCACTGCAAGC |
| 5615 | CAAUGCUUUGGUCUUCUCUGU | 11280 | CAATGCTTTGGTCTTCTCTGT |
| 5616 | CAAUGGACAGAGCCCUCACGC | 11281 | CAATGGACAGAGCCCTCACGC |
| 5617 | CAAUGGCAGUUCUCGAUAUUC | 11282 | CAATGGCAGTTCTCGATATTC |
| 5618 | CAAUUGCCAAUCCCUUGUGAC | 11283 | CAATTGCCAATCCCTTGTGAC |
| 5619 | CAAUUUCCAGCCCCAGGGCCC | 11284 | CAATTTCCAGCCCCAGGGCCC |
| 5620 | CACAAAUGCCAAAUGUACACA | 11285 | CACAAATGCCAAATGTACACA |
| 5621 | CACACACGACAGAAAACAGUG | 11286 | CACACACGACAGAAAACAGTG |
| 5622 | CACACAGCUGCCCCCGAGACC | 11287 | CACACAGCTGCCCCCGAGACC |
| 5623 | CACACAGUCCAGUUCGUGCAA | 11288 | CACACAGTCCAGTTCGTGCAA |
| 5624 | CACACCAGUUCACUCCUCUUG | 11289 | CACACCAGTTCACTCCTCTTG |
| 5625 | CACACCAUUCAGGCCCCCUUU | 11290 | CACACCATTCAGGCCCCCTTT |
| 5626 | CACACCAUUCUCCUGCCUCAG | 11291 | CACACCATTCTCCTGCCTCAG |
| 5627 | CACACCUGGGUGCAGGCCACG | 11292 | CACACCTGGGTGCAGGCCACG |
| 5628 | CACACGACAGAAAACAGUGCA | 11293 | CACACGACAGAAAACAGTGCA |
| 5629 | CACACUGCCGGCUGCCAUGGA | 11294 | CACACTGCCGGCTGCCATGGA |
| 5630 | CACACUGGCACUUGUAGCCAC | 11295 | CACACTGGCACTTGTAGCCAC |
| 5631 | CACAGACGAACUGCCGAGAGA | 11296 | CACAGACGAACTGCCGAGAGA |
| 5632 | CACAGAGCACAGCGGAAACCG | 11297 | CACAGAGCACAGCGGAAACCG |
| 5633 | CACAGAUACUGGCAGCCGCCA | 11298 | CACAGATACTGGCAGCCGCCA |
| 5634 | CACAGCCAGCCCGUCGGGGGC | 11299 | CACAGCCAGCCCGTCGGGGGC |
| 5635 | CACAGCCUUGCAGGCCUUCGU | 11300 | CACAGCCTTGCAGGCCTTCGT |
| 5636 | CACAGCGCAGUUUUCCUCGUC | 11301 | CACAGCGCAGTTTTCCTCGTC |
| 5637 | CACAGCGCCAGCUGGAGUGGA | 11302 | CACAGCGCCAGCTGGAGTGGA |
| 5638 | CACAGCGGAAACCGGGGACUU | 11303 | CACAGCGGAAACCGGGGACTT |
| 5639 | CACAGCUGAAGUCCCCGGAUU | 11304 | CACAGCTGAAGTCCCCGGATT |
| 5640 | CACAGCUGCCCCCGAGACCAG | 11305 | CACAGCTGCCCCCGAGACCAG |
| 5641 | CACAGCUGGGGGAUGCAGGUG | 11306 | CACAGCTGGGGGATGCAGGTG |
| 5642 | CACAGGACAGCCUUGCUCGUC | 11307 | CACAGGACAGCCTTGCTCGTC |
| 5643 | CACAGGCACGUGCCACCGUAC | 11308 | CACAGGCACGTGCCACCGTAC |
| 5644 | CACAGGCACUCGUAGCCGAUC | 11309 | CACAGGCACTCGTAGCCGATC |
| 5645 | CACAGGGCCCCGAGAAUAGUC | 11310 | CACAGGGCCCCGAGAATAGTC |
| 5646 | CACAGGUGAGCACCGGGCAGG | 11311 | CACAGGTGAGCACCGGGCAGG |
| 5647 | CACAGUAAGACAUUCAGGCUA | 11312 | CACAGTAAGACATTCAGGCTA |
| 5648 | CACAGUCCAGUUCGUGCAAAU | 11313 | CACAGTCCAGTTCGTGCAAAT |
| 5649 | CACAGUGUACAACUCUGAACU | 11314 | CACAGTGTACAACTCTGAACT |
| 5650 | CACAGUGUUUUGUCCCUGGGG | 11315 | CACAGTGTTTTGTCCCTGGGG |
| 5651 | CACAUACCCAUCAACGACAAG | 11316 | CACATACCCATCAACGACAAG |
| 5652 | CACAUUAACGCAGCCAACUUC | 11317 | CACATTAACGCAGCCAACTTC |
| 5653 | CACCACGAUGGCCCUUGGCUU | 11318 | CACCACGATGGCCCTTGGCTT |
| 5654 | CACCACGCCCGGCUAAUUUUU | 11319 | CACCACGCCCGGCTAATTTTT |
| 5655 | CACCACGGAUUCAGCCAGAUC | 11320 | CACCACGGATTCAGCCAGATC |
| 5656 | CACCAGCGAGUAGAUGUCCAC | 11321 | CACCAGCGAGTAGATGTCCAC |
| 5657 | CACCAGCUGGAAGCCGUCGGG | 11322 | CACCAGCTGGAAGCCGTCGGG |
| 5658 | CACCAGGCUGGUGUCCUGACA | 11323 | CACCAGGCTGGTGTCCTGACA |
| 5659 | CACCAGUUCACUCCUCUUGGC | 11324 | CACCAGTTCACTCCTCTTGGC |
| 5660 | CACCAUCACAGCGCCAGCUGG | 11325 | CACCATCACAGCGCCAGCTGG |
| 5661 | CACCAUGCAUGGUUUUUUUUU | 11326 | CACCATGCATGGTTTTTTTTT |
| 5662 | CACCAUUCAGGCCCCCUUUCU | 11327 | CACCATTCAGGCCCCCTTTCT |
| 5663 | CACCAUUCUCCUGCCUCAGCC | 11328 | CACCATTCTCCTGCCTCAGCC |
| 5664 | CACCCAUCUCCCAGAAGCCAC | 11329 | CACCCATCTCCCAGAAGCCAC |
| 5665 | CACCCGCCUCGGCCUCCCAAA | 11330 | CACCCGCCTCGGCCTCCCAAA |
| 5666 | CACCCUCCAGGUUCACGCAGA | 11331 | CACCCTCCAGGTTCACGCAGA |
| 5667 | CACCGGGCAGGAGGCCUCGUC | 11332 | CACCGGGCAGGAGGCCTCGTC |
| 5668 | CACCGUACCCAGCUGAUUUUU | 11333 | CACCGTACCCAGCTGATTTTT |
| 5669 | CACCGUGCAUGUUUUAAACAC | 11334 | CACCGTGCATGTTTTAAACAC |
| 5670 | CACCGUGGUGAGCCCAGGGGU | 11335 | CACCGTGGTGAGCCCAGGGGT |
| 5671 | CACCUCAGCCUCGCCAUGCCU | 11336 | CACCTCAGCCTCGCCATGCCT |
| 5672 | CACCUCCAGAACUGAGGAAUG | 11337 | CACCTCCAGAACTGAGGAATG |
| 5673 | CACCUCCGUGUCCAGAGCGAC | 11338 | CACCTCCGTGTCCAGAGCGAC |
| 5674 | CACCUCCUGGGCUCAGGCGAU | 11339 | CACCTCCTGGGCTCAGGCGAT |
| 5675 | CACCUCGAAAGACACUGGGUG | 11340 | CACCTCGAAAGACACTGGGTG |
| 5676 | CACCUGGGUGCAGGCCACGUG | 11341 | CACCTGGGTGCAGGCCACGTG |
| 5677 | CACCUGUGUCUGGCCAAAUUC | 11342 | CACCTGTGTCTGGCCAAATTC |
| 5678 | CACGACAGAAAACAGUGCAAA | 11343 | CACGACAGAAAACAGTGCAAA |
| 5679 | CACGACAGCCUCAAAUGCCUG | 11344 | CACGACAGCCTCAAATGCCTG |
| 5680 | CACGACCUGCUGUGUCCUAGC | 11345 | CACGACCTGCTGTGTCCTAGC |
| 5681 | CACGAGGAAAGGAAGAAACCA | 11346 | CACGAGGAAAGGAAGAAACCA |
| 5682 | CACGAUCACGGCUUUGAAGUC | 11347 | CACGATCACGGCTTTGAAGTC |
| 5683 | CACGAUGGCCCUUGGCUUGGA | 11348 | CACGATGGCCCTTGGCTTGGA |
| 5684 | CACGAUGGGGAGGACAAUGGA | 11349 | CACGATGGGGAGGACAATGGA |
| 5685 | CACGCAGAGCUGGCUGCAGGU | 11350 | CACGCAGAGCTGGCTGCAGGT |
| 5686 | CACGCCACGUCAUCCUCCAGA | 11351 | CACGCCACGTCATCCTCCAGA |
| 5687 | CACGCCCGGCUAAUUUUUUGU | 11352 | CACGCCCGGCTAATTTTTTGT |
| 5688 | CACGCCCUUGGUAUCCGCAAC | 11353 | CACGCCCTTGGTATCCGCAAC |
| 5689 | CACGCGGGAGUCUGACGGAGG | 11354 | CACGCGGGAGTCTGACGGAGG |
| 5690 | CACGCUACUGGGCUUCUUCUC | 11355 | CACGCTACTGGGCTTCTTCTC |
| 5691 | CACGCUCUGUCACACAGCUGC | 11356 | CACGCTCTGTCACACAGCTGC |
| 5692 | CACGGAUUCAGCCAGAUCAUU | 11357 | CACGGATTCAGCCAGATCATT |
| 5693 | CACGGCCAAGGUAACCGGGUG | 11358 | CACGGCCAAGGTAACCGGGTG |
| 5694 | CACGGCCCCCACAGCUGAAGU | 11359 | CACGGCCCCCACAGCTGAAGT |
| 5695 | CACGGCGAUUUCAGAAAGAAC | 11360 | CACGGCGATTTCAGAAAGAAC |
| 5696 | CACGGCUUUGAAGUCCCGGUC | 11361 | CACGGCTTTGAAGTCCCGGTC |
| 5697 | CACGGGAAUGGAAGUGGGUAG | 11362 | CACGGGAATGGAAGTGGGTAG |
| 5698 | CACGGGCUUUCCCUGGCCUGG | 11363 | CACGGGCTTTCCCTGGCCTGG |
| 5699 | CACGGUGGAGAGAAACUCAAA | 11364 | CACGGTGGAGAGAAACTCAAA |
| 5700 | CACGGUUCCCUGCACUGGGGG | 11365 | CACGGTTCCCTGCACTGGGGG |
| 5701 | CACGUAAAGACCCCUACAGCG | 11366 | CACGTAAAGACCCCTACAGCG |
| 5702 | CACGUCAUCCUCCAGACUGAC | 11367 | CACGTCATCCTCCAGACTGAC |
| 5703 | CACGUCUCCUGGGACUCAUCA | 11368 | CACGTCTCCTGGGACTCATCA |
| 5704 | CACGUCUUGGGGGAGCACGUC | 11369 | CACGTCTTGGGGGAGCACGTC |
| 5705 | CACGUCUUGGGGGGACAGCCU | 11370 | CACGTCTTGGGGGGACAGCCT |
| 5706 | CACGUGCCACCGUACCCAGCU | 11371 | CACGTGCCACCGTACCCAGCT |
| 5707 | CACGUGGCUGAAGAUCUCGGC | 11372 | CACGTGGCTGAAGATCTCGGC |
| 5708 | CACGUGUCCUCACGGCCAAGG | 11373 | CACGTGTCCTCACGGCCAAGG |
| 5709 | CACGUGUUAGCCAGGAUGGUC | 11374 | CACGTGTTAGCCAGGATGGTC |
| 5710 | CACGUUCCUCAGGUUGGGGAU | 11375 | CACGTTCCTCAGGTTGGGGAT |
| 5711 | CACGUUGACUCCUGAGUUUAG | 11376 | CACGTTGACTCCTGAGTTTAG |
| 5712 | CACUAGGUGGGGGACAUAAA | 11377 | CACTAGGTGGGCGGACATAAA |
| 5713 | CACUAUCUCCACCGUGGUGAG | 11378 | CACTATCTCCACCGTGGTGAG |
| 5714 | CACUAUCUGUACAGGGACGCA | 11379 | CACTATCTGTACAGGGACGCA |
| 5715 | CACUCAGCGCUGCCAUCGCAG | 11380 | CACTCAGCGCTGCCATCGCAG |
| 5716 | CACUCAUACAUACAACGGGGA | 11381 | CACTCATACATACAACGGGGA |
| 5717 | CACUCAUCCGAGCCAUCUUCG | 11382 | CACTCATCCGAGCCATCTTCG |
| 5718 | CACUCAUCGAUAUCGCACUCU | 11383 | CACTCATCGATATCGCACTCT |
| 5719 | CACUCAUCGAUAUCUUCGCAU | 11384 | CACTCATCGATATCTTCGCAT |
| 5720 | CACUCCUCUUGGCUGGGUGAG | 11385 | CACTCCTCTTGGCTGGGTGAG |
| 5721 | CACUCGCCACUUAGGCAGUGG | 11386 | CACTCGCCACTTAGGCAGTGG |
| 5722 | CACUCGUAGCCGAUCUUAAGG | 11387 | CACTCGTAGCCGATCTTAAGG |
| 5723 | CACUCUUUGAUGGGUUCAUCU | 11388 | CACTCTTTGATGGGTTCATCT |
| 5724 | CACUGAAAAUGGCUUCGUUGA | 11389 | CACTGAAAATGGCTTCGTTGA |
| 5725 | CACUGAACAAAUACAGCAACC | 11390 | CACTGAACAAATACAGCAACC |
| 5726 | CACUGAAUGUUUUCAGUCACC | 11391 | CACTGAATGTTTTCAGTCACC |
| 5727 | CACUGAGGAGAUCUAGGGUGA | 11392 | CACTGAGGAGATCTAGGGTGA |
| 5728 | CACUGCAACCUCCACCUCCUG | 11393 | CACTGCAACCTCCACCTCCTG |
| 5729 | CACUGCAAGCUCCGCUUCCCG | 11394 | CACTGCAAGCTCCGCTTCCCG |
| 5730 | CACUGCAGCCUCAGCCUCUCU | 11395 | CACTGCAGCCTCAGCCTCTCT |
| 5731 | CACUGCAGCCUCAGCCUCUGU | 11396 | CACTGCAGCCTCAGCCTCTGT |
| 5732 | CACUGCAGUCCCCGCCGCGGC | 11397 | CACTGCAGTCCCCGCCGCGGC |
| 5733 | CACUGCCGGCUGCCAUGGAUG | 11398 | CACTGCCGGCTGCCATGGATG |
| 5734 | CACUGCGCCCGGCCUCACCGU | 11399 | CACTGCGCCCGGCCTCACCGT |
| 5735 | CACUGGAACUCGUUUCUUUCG | 11400 | CACTGGAACTCGTTTCTTTCG |
| 5736 | CACUGGAAGCUGGCGGGACCA | 11401 | CACTGGAAGCTGGCGGGACCA |
| 5737 | CACUGGAAUUCGUCAGGGCGA | 11402 | CACTGGAATTCGTCAGGGCGA |
| 5738 | CACUGGCACUUGUAGCCACCC | 11403 | CACTGGCACTTGTAGCCACCC |
| 5739 | CACUGGGGGGGACACAGUGUU | 11404 | CACTGGGGGGGACACAGTGTT |
| 5740 | CACUGGGUGGGUCAUGAUUCG | 11405 | CACTGGGTGGGTCATGATTCG |
| 5741 | CACUGUAGGGAGAGGCACGCU | 11406 | CACTGTAGGGAGAGGCACGCT |
| 5742 | CACUGUCCGAAGCCUGUUCUG | 11407 | CACTGTCCGAAGCCTGTTCTG |
| 5743 | CACUGUCUCUCCGGACAUCAG | 11408 | CACTGTCTCTCCGGACATCAG |
| 5744 | CACUUAAUAAAUAUUAAGGGU | 11409 | CACTTAATAAATATTAAGGGT |
| 5745 | CACUUAGGCAGUGGAACUCGA | 11410 | CACTTAGGCAGTGGAACTCGA |
| 5746 | CACUUCCCAUCGUGGCAGCGA | 11411 | CACTTCCCATCGTGGCAGCGA |
| 5747 | CACUUGAACUUGUUGGGUCCC | 11412 | CACTTGAACTTGTTGGGTCCC |
| 5748 | CACUUGCUUCUCUGGGCCUGA | 11413 | CACTTGCTTCTCTGGGCCTGA |
| 5749 | CACUUGGCCAUCGCACCUCCA | 11414 | CACTTGGCCATCGCACCTCCA |
| 5750 | CACUUGUAGCCACCCUCCAGG | 11415 | CACTTGTAGCCACCCTCCAGG |
| 5751 | CACUUGUAGGAGAUGCAUUUC | 11416 | CACTTGTAGGAGATGCATTTC |
| 5752 | CAGAAAACAGUGCAAAAUAAU | 11417 | CAGAAAACAGTGCAAAATAAT |
| 5753 | CAGAAAGAACCUGAAGUCCCG | 11418 | CAGAAAGAACCTGAAGTCCCG |
| 5754 | CAGAAAGGCUUAUCACGGUUC | 11419 | CAGAAAGGCTTATCACGGTTC |
| 5755 | CAGAACUGAGGAAUGCAGCGG | 11420 | CAGAACTGAGGAATGCAGCGG |
| 5756 | CAGAAGCCACUCAUACAUACA | 11421 | CAGAAGCCACTCATACATACA |
| 5757 | CAGACAAGCACGUCUCCUGGG | 11422 | CAGACAAGCACGTCTCCTGGG |
| 5758 | CAGACAGCCUUGCUCGUCUGA | 11423 | CAGACAGCCTTGCTCGTCTGA |
| 5759 | CAGACCAAGGAGGGGGGGGGA | 11424 | CAGACCAAGGAGGGGCGGGGA |
| 5760 | CAGACCAGUAGAUUCUAUUGC | 11425 | CAGACCAGTAGATTCTATTGC |
| 5761 | CAGACCCACUUGUAGGAGAUG | 11426 | CAGACCCACTTGTAGGAGATG |
| 5762 | CAGACGAACUGCCGAGAGAUG | 11427 | CAGACGAACTGCCGAGAGATG |
| 5763 | CAGACGUGGGAACAGCCGCCG | 11428 | CAGACGTGGGAACAGCCGCCG |
| 5764 | CAGACUGACCAUCGAGGGGUA | 11429 | CAGACTGACCATCGAGGGGTA |
| 5765 | CAGACUGACCAUCUGUCUCGA | 11430 | CAGACTGACCATCTGTCTCGA |
| 5766 | CAGACUGCGGACUGCAGUGGC | 11431 | CAGACTGCGGACTGCAGTGGC |
| 5767 | CAGACUGGAGGAUUUAUUUAU | 11432 | CAGACTGGAGGATTTATTTAT |
| 5768 | CAGACUUUGUCCAGGGUGAUG | 11433 | CAGACTTTGTCCAGGGTGATG |
| 5769 | CAGAGACAGUGCCCAGGACAG | 11434 | CAGAGACAGTGCCCAGGACAG |
| 5770 | CAGAGACCCAGCUCCGUGGCG | 11435 | CAGAGACCCAGCTCCGTGGCG |
| 5771 | CAGAGCACAGCGGAAACCGGG | 11436 | CAGAGCACAGCGGAAACCGGG |
| 5772 | CAGAGCACUGGAAUUCGUCAG | 11437 | CAGAGCACTGGAATTCGTCAG |
| 5773 | CAGAGCCAUCCUGGCACUCAG | 11438 | CAGAGCCATCCTGGCACTCAG |
| 5774 | CAGAGCCCUCACGCUACUGGG | 11439 | CAGAGCCCTCACGCTACTGGG |
| 5775 | CAGAGCGACCACGUUCCUCAG | 11440 | CAGAGCGACCACGTTCCTCAG |
| 5776 | CAGAGCUGGCUGCAGGUGUCG | 11441 | CAGAGCTGGCTGCAGGTGTCG |
| 5777 | CAGAGCUUGGUGAGACAUUGU | 11442 | CAGAGCTTGGTGAGACATTGT |
| 5778 | CAGAGGCAAUAACCCCCUACA | 11443 | CAGAGGCAATAACCCCCTACA |
| 5779 | CAGAGGCCAUGGGCUGCUGAU | 11444 | CAGAGGCCATGGGCTGCTGAT |
| 5780 | CAGAGUCGGUCCAGUAGAUGU | 11445 | CAGAGTCGGTCCAGTAGATGT |
| 5781 | CAGAGUGUCACAUUAACGCAG | 11446 | CAGAGTGTCACATTAACGCAG |
| 5782 | CAGAGUGUCAGACAGCCUUGC | 11447 | CAGAGTGTCAGACAGCCTTGC |
| 5783 | CAGAUACUGGCAGCCGCCAUU | 11448 | CAGATACTGGCAGCCGCCATT |
| 5784 | CAGAUCAUUCUCUGGGACAGG | 11449 | CAGATCATTCTCTGGGACAGG |
| 5785 | CAGAUCAUUUCCGACGCCAUG | 11450 | CAGATCATTTCCGACGCCATG |
| 5786 | CAGAUGAAUAAAUAUAUAAAA | 11451 | CAGATGAATAAATATATAAAA |
| 5787 | CAGAUGUUCACGCCACGUCAU | 11452 | CAGATGTTCACGCCACGTCAT |
| 5788 | CAGAUUUGUCCUUGCAGUCGG | 11453 | CAGATTTGTCCTTGCAGTCGG |
| 5789 | CAGCAACCAGGGUUUGCAAAA | 11454 | CAGCAACCAGGGTTTGCAAAA |
| 5790 | CAGCAACGUCGCCCAGAGCUU | 11455 | CAGCAACGTCGCCCAGAGCTT |
| 5791 | CAGCAGCAUGCCGUCCGGGCA | 11456 | CAGCAGCATGCCGTCCGGGCA |
| 5792 | CAGCAUGCCGUCCGGGCAGGC | 11457 | CAGCATGCCGTCCGGGCAGGC |
| 5793 | CAGCCAACAAGUUGACAUCGG | 11458 | CAGCCAACAAGTTGACATCGG |
| 5794 | CAGCCAACUUCAUCGCUCAUG | 11459 | CAGCCAACTTCATCGCTCATG |
| 5795 | CAGCCACACCUGGGUGCAGGC | 11460 | CAGCCACACCTGGGTGCAGGC |
| 5796 | CAGCCAGAUCAUUUCCGACGC | 11461 | CAGCCAGATCATTTCCGACGC |
| 5797 | CAGCCAGCCCGUCGGGGGCCU | 11462 | CAGCCAGCCCGTCGGGGGCCT |
| 5798 | CAGCCCCAGGGCCCCAUGCUC | 11463 | CAGCCCCAGGGCCCCATGCTC |
| 5799 | CAGCCCGUCGGGGGCCUGGAU | 11464 | CAGCCCGTCGGGGGCCTGGAT |
| 5800 | CAGCCGCCAUUGCUCAGGGUG | 11465 | CAGCCGCCATTGCTCAGGGTG |
| 5801 | CAGCCGCCGUUGUUGUCCAAG | 11466 | CAGCCGCCGTTGTTGTCCAAG |
| 5802 | CAGCCGGGAGGUGUCGGGAAC | 11467 | CAGCCGGGAGGTGTCGGGAAC |
| 5803 | CAGCCUCAAAUGCCUGAGCUC | 11468 | CAGCCTCAAATGCCTGAGCTC |
| 5804 | CAGCCUCAGCCUCUCUUGGCU | 11469 | CAGCCTCAGCCTCTCTTGGCT |
| 5805 | CAGCCUCAGCCUCUGUGAGGC | 11470 | CAGCCTCAGCCTCTGTGAGGC |
| 5806 | CAGCCUCCCAAAGUGCUGGGA | 11471 | CAGCCTCCCAAAGTGCTGGGA |
| 5807 | CAGCCUCCCAAGUAGCUGGGA | 11472 | CAGCCTCCCAAGTAGCTGGGA |
| 5808 | CAGCCUCCCGAGUAGCUGGGA | 11473 | CAGCCTCCCGAGTAGCTGGGA |
| 5809 | CAGCCUCGCCAUGCCUGGCCA | 11474 | CAGCCTCGCCATGCCTGGCCA |
| 5810 | CAGCCUCUCUUGGCUGGGUGA | 11475 | CAGCCTCTCTTGGCTGGGTGA |
| 5811 | CAGCCUCUGCCAGGCAGUGUC | 11476 | CAGCCTCTGCCAGGCAGTGTC |
| 5812 | CAGCCUCUGUGAGGCAGCUCC | 11477 | CAGCCTCTGTGAGGCAGCTCC |
| 5813 | CAGCCUCUUUUCAUCCUCCAA | 11478 | CAGCCTCTTTTCATCCTCCAA |
| 5814 | CAGCCUUGCAGGCCUUCGUGU | 11479 | CAGCCTTGCAGGCCTTCGTGT |
| 5815 | CAGCCUUGCUCGUCUGAGCCG | 11480 | CAGCCTTGCTCGTCTGAGCCG |
| 5816 | CAGCGAAACUCGUCCUGGGAG | 11481 | CAGCGAAACTCGTCCTGGGAG |
| 5817 | CAGCGAGUAGAUGUCCACACC | 11482 | CAGCGAGTAGATGTCCACACC |
| 5818 | CAGCGCAAUUUCCAGCCCCAG | 11483 | CAGCGCAATTTCCAGCCCCAG |
| 5819 | CAGCGCAGUUUUCCUCGUCAG | 11484 | CAGCGCAGTTTTCCTCGTCAG |
| 5820 | CAGCGCCAGCUGGAGUGGAUG | 11485 | CAGCGCCAGCTGGAGTGGATG |
| 5821 | CAGCGCUGCCAUCGCAGACCC | 11486 | CAGCGCTGCCATCGCAGACCC |
| 5822 | CAGCGCUGCGGCCACUCAUCC | 11487 | CAGCGCTGCGGCCACTCATCC |
| 5823 | CAGCGGAAACCGGGGACUUCG | 11488 | CAGCGGAAACCGGGGACTTCG |
| 5824 | CAGCGGUUGACACGGCCCCCA | 11489 | CAGCGGTTGACACGGCCCCCA |
| 5825 | CAGCGUCAUCUUCCUGACCUC | 11490 | CAGCGTCATCTTCCTGACCTC |
| 5826 | CAGCUCAGCCUCCCAAAGUGC | 11491 | CAGCTCAGCCTCCCAAAGTGC |
| 5827 | CAGCUCCGUGGCGAUGGGGAG | 11492 | CAGCTCCGTGGCGATGGGGAG |
| 5828 | CAGCUCCUCAUGUCCCUGGCC | 11493 | CAGCTCCTCATGTCCCTGGCC |
| 5829 | CAGCUGAAGUCCCCGGAUUUG | 11494 | CAGCTGAAGTCCCCGGATTTG |
| 5830 | CAGCUGAUUUUUAACUUUUUG | 11495 | CAGCTGATTTTTAACTTTTTG |
| 5831 | CAGCUGCCCCCGAGACCAGAG | 11496 | CAGCTGCCCCCGAGACCAGAG |
| 5832 | CAGCUGGAAGCCGUCGGGGCA | 11497 | CAGCTGGAAGCCGTCGGGGCA |
| 5833 | CAGCUGGAAGCCUUCCUCACA | 11498 | CAGCTGGAAGCCTTCCTCACA |
| 5834 | CAGCUGGAGUGGAUGCACUCG | 11499 | CAGCTGGAGTGGATGCACTCG |
| 5835 | CAGCUGGGGGAUGCAGGUGGA | 11500 | CAGCTGGGGGATGCAGGTGGA |
| 5836 | CAGGAACCGCGGAGGAACGCC | 11501 | CAGGAACCGCGGAGGAACGCC |
| 5837 | CAGGAAGGGUUCUGGGCAGGG | 11502 | CAGGAAGGGTTCTGGGCAGGG |
| 5838 | CAGGACAAGGUGGGGACGGAG | 11503 | CAGGACAAGGTGGGGACGGAG |
| 5839 | CAGGACAGAGUCGGUCCAGUA | 11504 | CAGGACAGAGTCGGTCCAGTA |
| 5840 | CAGGACAGCCUUGCUCGUCUG | 11505 | CAGGACAGCCTTGCTCGTCTG |
| 5841 | CAGGAGGCCUCGUCUGAGCCG | 11506 | CAGGAGGCCTCGTCTGAGCCG |
| 5842 | CAGGAGGGCCCAGGAUAACGG | 11507 | CAGGAGGGCCCAGGATAACGG |
| 5843 | CAGGAUAACGGAGGGCGACUC | 11508 | CAGGATAACGGAGGGCGACTC |
| 5844 | CAGGAUCCACCACGAUGGCCC | 11509 | CAGGATCCACCACGATGGCCC |
| 5845 | CAGGAUGGUCUCGAUCUCCUG | 11510 | CAGGATGGTCTCGATCTCCTG |
| 5846 | CAGGCAAAGGAAGACGAGGAG | 11511 | CAGGCAAAGGAAGACGAGGAG |
| 5847 | CAGGCAAUGCUUUGGUCUUCU | 11512 | CAGGCAATGCTTTGGTCTTCT |
| 5848 | CAGGCACGUGCCACCGUACCC | 11513 | CAGGCACGTGCCACCGTACCC |
| 5849 | CAGGCACUCGUAGCCGAUCUU | 11514 | CAGGCACTCGTAGCCGATCTT |
| 5850 | CAGGCACUUAAUAAAUAUUAA | 11515 | CAGGCACTTAATAAATATTAA |
| 5851 | CAGGCAGAUGUUCACGCCACG | 11516 | CAGGCAGATGTTCACGCCACG |
| 5852 | CAGGCAGCCGGGAGGUGUCGG | 11517 | CAGGCAGCCGGGAGGTGTCGG |
| 5853 | CAGGCAGUGUCCCGACCCGGA | 11518 | CAGGCAGTGTCCCGACCCGGA |
| 5854 | CAGGCCACGUGUCCUCACGGC | 11519 | CAGGCCACGTGTCCTCACGGC |
| 5855 | CAGGCCAGACUGCGGACUGCA | 11520 | CAGGCCAGACTGCGGACTGCA |
| 5856 | CAGGCCCACAGCUGGGGGAUG | 11521 | CAGGCCCACAGCTGGGGGATG |
| 5857 | CAGGCCCCCUUUCUUGAUCUU | 11522 | CAGGCCCCCTTTCTTGATCTT |
| 5858 | CAGGCCUGGUCUCCAACUCCU | 11523 | CAGGCCTGGTCTCCAACTCCT |
| 5859 | CAGGCCUUCGUGUGGGGGUCC | 11524 | CAGGCCTTCGTGTGGGGGTCC |
| 5860 | CAGGCGAUCCUCCUGCCUCAG | 11525 | CAGGCGATCCTCCTGCCTCAG |
| 5861 | CAGGCGCAGGUAAACUUGGGC | 11526 | CAGGCGCAGGTAAACTTGGGC |
| 5862 | CAGGCGUGAGCCACUGCGCCC | 11527 | CAGGCGTGAGCCACTGCGCCC |
| 5863 | CAGGCGUGAGGCACCUGUGUC | 11528 | CAGGCGTGAGGCACCTGTGTC |
| 5864 | CAGGCUACAAAAACCUUCUAU | 11529 | CAGGCTACAAAAACCTTCTAT |
| 5865 | CAGGCUCUGCCUCUGGGAAGU | 11530 | CAGGCTCTGCCTCTGGGAAGT |
| 5866 | CAGGCUGGAAAGCAGUGGCAU | 11531 | CAGGCTGGAAAGCAGTGGCAT |
| 5867 | CAGGCUGGAGUGCAGUGGCUC | 11532 | CAGGCTGGAGTGCAGTGGCTC |
| 5868 | CAGGCUGGUGUCCUGACAGCC | 11533 | CAGGCTGGTGTCCTGACAGCC |
| 5869 | CAGGGACGCAUUUACGUGCUC | 11534 | CAGGGACGCATTTACGTGCTC |
| 5870 | CAGGGACGGGACUCCAGGCAG | 11535 | CAGGGACGGGACTCCAGGCAG |
| 5871 | CAGGGAGGCACAGAUACUGGC | 11536 | CAGGGAGGCACAGATACTGGC |
| 5872 | CAGGGCAAAGGCUAACCUGGC | 11537 | CAGGGCAAAGGCTAACCTGGC |
| 5873 | CAGGGCCAGGGGGUCCCGUUG | 11538 | CAGGGCCAGGGGGTCCCGTTG |
| 5874 | CAGGGCCCCAUGCUCGCAGCC | 11539 | CAGGGCCCCATGCTCGCAGCC |
| 5875 | CAGGGCCCCGAGAAUAGUCAC | 11540 | CAGGGCCCCGAGAATAGTCAC |
| 5876 | CAGGGCGACAGGUGGCCACAG | 11541 | CAGGGCGACAGGTGGCCACAG |
| 5877 | CAGGGGCUACUGUCCCCUUGG | 11542 | CAGGGGCTACTGTCCCCTTGG |
| 5878 | CAGGGGGUCCCGUUGGUGCCA | 11543 | CAGGGGGTCCCGTTGGTGCCA |
| 5879 | CAGGGGUGGCCCCAGGCAGCC | 11544 | CAGGGGTGGCCCCAGGCAGCC |
| 5880 | CAGGGUGAUGCAUUCGCCGCU | 11545 | CAGGGTGATGCATTCGCCGCT |
| 5881 | CAGGGUGGUCCUCUCACACCA | 11546 | CAGGGTGGTCCTCTCACACCA |
| 5882 | CAGGGUUUGCAAAAAUAAAUA | 11547 | CAGGGTTTGCAAAAATAAATA |
| 5883 | CAGGUAAACUUGGGCGAGUGG | 11548 | CAGGTAAACTTGGGCGAGTGG |
| 5884 | CAGGUCAGACCAGUAGAUUCU | 11549 | CAGGTCAGACCAGTAGATTCT |
| 5885 | CAGGUCGGGUGGUUGUGUGCU | 11550 | CAGGTCGGGTGGTTGTGTGCT |
| 5886 | CAGGUGACAGACAAGCACGUC | 11551 | CAGGTGACAGACAAGCACGTC |
| 5887 | CAGGUGAGCACCGGGCAGGAG | 11552 | CAGGTGAGCACCGGGCAGGAG |
| 5888 | CAGGUGCCCGCCACCACGCCC | 11553 | CAGGTGCCCGCCACCACGCCC |
| 5889 | CAGGUGGAGCUGUUGCACUGG | 11554 | CAGGTGGAGCTGTTGCACTGG |
| 5890 | CAGGUGGCCACAGCGCAGUUU | 11555 | CAGGTGGCCACAGCGCAGTTT |
| 5891 | CAGGUGGCCACAGGACAGCCU | 11556 | CAGGTGGCCACAGGACAGCCT |
| 5892 | CAGGUGUCGGGAUCCUGACAC | 11557 | CAGGTGTCGGGATCCTGACAC |
| 5893 | CAGGUUCACGCAGAGCUGGCU | 11558 | CAGGTTCACGCAGAGCTGGCT |
| 5894 | CAGGUUGGGGAUGAGGCUGGU | 11559 | CAGGTTGGGGATGAGGCTGGT |
| 5895 | CAGUAACACGGCGAUUUCAGA | 11560 | CAGTAACACGGCGATTTCAGA |
| 5896 | CAGUAAGACAUUCAGGCUACA | 11561 | CAGTAAGACATTCAGGCTACA |
| 5897 | CAGUACAUGAAGCCAUGAACA | 11562 | CAGTACATGAAGCCATGAACA |
| 5898 | CAGUAGAGGCGGCCACUGAGG | 11563 | CAGTAGAGGCGGCCACTGAGG |
| 5899 | CAGUAGAUGUUGCUGUGGAUC | 11564 | CAGTAGATGTTGCTGTGGATC |
| 5900 | CAGUAGAUUCUAUUGCUGGCC | 11565 | CAGTAGATTCTATTGCTGGCC |
| 5901 | CAGUAGGUUUUCAGCCAACAA | 11566 | CAGTAGGTTTTCAGCCAACAA |
| 5902 | CAGUCACCAGCGAGUAGAUGU | 11567 | CAGTCACCAGCGAGTAGATGT |
| 5903 | CAGUCAGUCCAGUACAUGAAG | 11568 | CAGTCAGTCCAGTACATGAAG |
| 5904 | CAGUCAUAUUCCCGGUCACAC | 11569 | CAGTCATATTCCCGGTCACAC |
| 5905 | CAGUCCACAGCCAGCCCGUCG | 11570 | CAGTCCACAGCCAGCCCGTCG |
| 5906 | CAGUCCACUUGGCCAUCGCAC | 11571 | CAGTCCACTTGGCCATCGCAC |
| 5907 | CAGUCCAGUACAUGAAGCCAU | 11572 | CAGTCCAGTACATGAAGCCAT |
| 5908 | CAGUCCAGUUCGUGCAAAUAA | 11573 | CAGTCCAGTTCGTGCAAATAA |
| 5909 | CAGUCCCCGCCGCGGCGAGGA | 11574 | CAGTCCCCGCCGCGGCGAGGA |
| 5910 | CAGUCCCGGCAGUCUCUAGCC | 11575 | CAGTCCCGGCAGTCTCTAGCC |
| 5911 | CAGUCCCGGUCUGAGUCACAG | 11576 | CAGTCCCGGTCTGAGTCACAG |
| 5912 | CAGUCGGGGCCACCAUCACAG | 11577 | CAGTCGGGGCCACCATCACAG |
| 5913 | CAGUCGGGGUCGUUGUCGCAG | 11578 | CAGTCGGGGTCGTTGTCGCAG |
| 5914 | CAGUCUCUAGCCAUGUUGCAG | 11579 | CAGTCTCTAGCCATGTTGCAG |
| 5915 | CAGUGACUCAGGCUCUGCCUC | 11580 | CAGTGACTCAGGCTCTGCCTC |
| 5916 | CAGUGCAAAAUAAUAACACAA | 11581 | CAGTGCAAAATAATAACACAA |
| 5917 | CAGUGCAACAGUAACACGGCG | 11582 | CAGTGCAACAGTAACACGGCG |
| 5918 | CAGUGCCCAGGACAGAGUCGG | 11583 | CAGTGCCCAGGACAGAGTCGG |
| 5919 | CAGUGGAACUCGAAGGCCGAG | 11584 | CAGTGGAACTCGAAGGCCGAG |
| 5920 | CAGUGGCAUAAUCAUAGCUCA | 11585 | CAGTGGCATAATCATAGCTCA |
| 5921 | CAGUGGCGCAAUCUCGGCUCA | 11586 | CAGTGGCGCAATCTCGGCTCA |
| 5922 | CAGUGGCUCGAUCAUGGCUCA | 11587 | CAGTGGCTCGATCATGGCTCA |
| 5923 | CAGUGGUUUAAAAAGUGACAC | 11588 | CAGTGGTTTAAAAAGTGACAC |
| 5924 | CAGUGUACAACUCUGAACUGA | 11589 | CAGTGTACAACTCTGAACTGA |
| 5925 | CAGUGUCCCGACCCGGAUCAC | 11590 | CAGTGTCCCGACCCGGATCAC |
| 5926 | CAGUGUUUUGUCCCUGGGGAC | 11591 | CAGTGTTTTGTCCCTGGGGAC |
| 5927 | CAGUUCACUCCUCUUGGCUGG | 11592 | CAGTTCACTCCTCTTGGCTGG |
| 5928 | CAGUUCGUGCAAAUAAUCUUU | 11593 | CAGTTCGTGCAAATAATCTTT |
| 5929 | CAGUUCUCGAUAUUCACGAUC | 11594 | CAGTTCTCGATATTCACGATC |
| 5930 | CAGUUCUUCCAUAGAAGGAAG | 11595 | CAGTTCTTCCATAGAAGGAAG |
| 5931 | CAGUUUCAACCAAUAUACAAA | 11596 | CAGTTTCAACCAATATACAAA |
| 5932 | CAGUUUCCAUCAGAGCACUGG | 11597 | CAGTTTCCATCAGAGCACTGG |
| 5933 | CAGUUUUCCUCGUCAGAUUUG | 11598 | CAGTTTTCCTCGTCAGATTTG |
| 5934 | CAUAAAGAAGAGGCAUUUCAG | 11599 | CATAAAGAAGAGGCATTTCAG |
| 5935 | CAUAAAGACGACAAUGGCAGU | 11600 | CATAAAGACGACAATGGCAGT |
| 5936 | CAUAACAAAAAAUCCCCACUA | 11601 | CATAACAAAAAATCCCCACTA |
| 5937 | CAUAAUCAUAGCUCACGACAG | 11602 | CATAATCATAGCTCACGACAG |
| 5938 | CAUACAACGGGGACAUCAUUC | 11603 | CATACAACGGGGACATCATTC |
| 5939 | CAUACAUACAACGGGGACAUC | 11604 | CATACATACAACGGGGACATC |
| 5940 | CAUACCCAUCAACGACAAGAU | 11605 | CATACCCATCAACGACAAGAT |
| 5941 | CAUAGAAGAGGUAAACACGUU | 11606 | CATAGAAGAGGTAAACACGTT |
| 5942 | CAUAGAAGGAAGACCCCCAGG | 11607 | CATAGAAGGAAGACCCCCAGG |
| 5943 | CAUAGAAGUGGAAGCACUAGG | 11608 | CATAGAAGTGGAAGCACTAGG |
| 5944 | CAUAGCUCACGACAGCCUCAA | 11609 | CATAGCTCACGACAGCCTCAA |
| 5945 | CAUAGGAAGAGACGCCGUGGG | 11610 | CATAGGAAGAGACGCCGTGGG |
| 5946 | CAUAUCCUCUGGGGACAGUAG | 11611 | CATATCCTCTGGGGACAGTAG |
| 5947 | CAUAUUCCCGGUCACACUGCC | 11612 | CATATTCCCGGTCACACTGCC |
| 5948 | CAUCAACGACAAGAUUGGGGA | 11613 | CATCAACGACAAGATTGGGGA |
| 5949 | CAUCACAGCGCCAGCUGGAGU | 11614 | CATCACAGCGCCAGCTGGAGT |
| 5950 | CAUCAGAGCACUGGAAUUCGU | 11615 | CATCAGAGCACTGGAATTCGT |
| 5951 | CAUCAGAGCCAUCCUGGCACU | 11616 | CATCAGAGCCATCCTGGCACT |
| 5952 | CAUCAGUGCAACAGUAACACG | 11617 | CATCAGTGCAACAGTAACACG |
| 5953 | CAUCAUUCUCCCAAAAAGCGU | 11618 | CATCATTCTCCCAAAAAGCGT |
| 5954 | CAUCAUUUGGUGAAUGAGUUU | 11619 | CATCATTTGGTGAATGAGTTT |
| 5955 | CAUCCCAACACACACGACAGA | 11620 | CATCCCAACACACACGACAGA |
| 5956 | CAUCCCCUCCCCUUUCAUCUU | 11621 | CATCCCCTCCCCTTTCATCTT |
| 5957 | CAUCCGAGCCAUCUUCGCAGU | 11622 | CATCCGAGCCATCTTCGCAGT |
| 5958 | CAUCCUCCAAGAUGGUCUUCC | 11623 | CATCCTCCAAGATGGTCTTCC |
| 5959 | CAUCCUCCAGACUGACCAUCG | 11624 | CATCCTCCAGACTGACCATCG |
| 5960 | CAUCCUCCAGACUGACCAUCU | 11625 | CATCCTCCAGACTGACCATCT |
| 5961 | CAUCCUCCCACCUCAGCCUCG | 11626 | CATCCTCCCACCTCAGCCTCG |
| 5962 | CAUCCUCUGUGGUCUUCUGAU | 11627 | CATCCTCTGTGGTCTTCTGAT |
| 5963 | CAUCCUGGCACUCAGCGCUGC | 11628 | CATCCTGGCACTCAGCGCTGC |
| 5964 | CAUCCUGGUCCCCCCGGGCCU | 11629 | CATCCTGGTCCCCCCGGGCCT |
| 5965 | CAUCGAGGGGUAGCUGUAGCC | 11630 | CATCGAGGGGTAGCTGTAGCC |
| 5966 | CAUCGAUAUCGCACUCUUUGA | 11631 | CATCGATATCGCACTCTTTGA |
| 5967 | CAUCGAUAUCUUCGCAUCUUC | 11632 | CATCGATATCTTCGCATCTTC |
| 5968 | CAUCGAUGCUUGAGAUGGAGU | 11633 | CATCGATGCTTGAGATGGAGT |
| 5969 | CAUCGCACCUCCAGAACUGAG | 11634 | CATCGCACCTCCAGAACTGAG |
| 5970 | CAUCGCAGACCCACUUGUAGG | 11635 | CATCGCAGACCCACTTGTAGG |
| 5971 | CAUCGCUCAUGUCCUUGCAGU | 11636 | CATCGCTCATGTCCTTGCAGT |
| 5972 | CAUCGGAACCUGUGAGGCGGU | 11637 | CATCGGAACCTGTGAGGCGGT |
| 5973 | CAUCGUGGCAGCGAAACUCGU | 11638 | CATCGTGGCAGCGAAACTCGT |
| 5974 | CAUCUCCCAGAAGCCACUCAU | 11639 | CATCTCCCAGAAGCCACTCAT |
| 5975 | CAUCUGACCAGUCCCGGCAGU | 11640 | CATCTGACCAGTCCCGGCAGT |
| 5976 | CAUCUGCUGUUGUGUGUUGAA | 11641 | CATCTGCTGTTGTGTGTTGAA |
| 5977 | CAUCUGUCGCCCACGUGGCUG | 11642 | CATCTGTCGCCCACGTGGCTG |
| 5978 | CAUCUGUCGCCCACUGCAGUC | 11643 | CATCTGTCGCCCACTGCAGTC |
| 5979 | CAUCUGUCUCGAGGGGUAGCU | 11644 | CATCTGTCTCGAGGGGTAGCT |
| 5980 | CAUCUGUUGCCCAGGCUGGAG | 11645 | CATCTGTTGCCCAGGCTGGAG |
| 5981 | CAUCUUCACGCGGGAGUCUGA | 11646 | CATCTTCACGCGGGAGTCTGA |
| 5982 | CAUCUUCCAUGUUUGAGGAUU | 11647 | CATCTTCCATGTTTGAGGATT |
| 5983 | CAUCUUCCUGACCUCGUGCCG | 11648 | CATCTTCCTGACCTCGTGCCG |
| 5984 | CAUCUUCGCAGUCGGGGUCGU | 11649 | CATCTTCGCAGTCGGGGTCGT |
| 5985 | CAUCUUCGCUGGGCCACCAGC | 11650 | CATCTTCGCTGGGCCACCAGC |
| 5986 | CAUGAACAGGAUCCACCACGA | 11651 | CATGAACAGGATCCACCACGA |
| 5987 | CAUGAAGCCAUGAACAGGAUC | 11652 | CATGAAGCCATGAACAGGATC |
| 5988 | CAUGAAUCCCUUUCCUGGCUU | 11653 | CATGAATCCCTTTCCTGGCTT |
| 5989 | CAUGAUCCACCCGCCUCGGCC | 11654 | CATGATCCACCCGCCTCGGCC |
| 5990 | CAUGAUUCGGGGGUGACAGGG | 11655 | CATGATTCGGGGGTGACAGGG |
| 5991 | CAUGCAUGGUUUUUUUUUGUU | 11656 | CATGCATGGTTTTTTTTTGTT |
| 5992 | CAUGCCGUCCGGGCAGGCGCA | 11657 | CATGCCGTCCGGGCAGGCGCA |
| 5993 | CAUGCCUGGCCAGAGGCCAUG | 11658 | CATGCCTGGCCAGAGGCCATG |
| 5994 | CAUGCUCGCAGCCUCUGCCAG | 11659 | CATGCTCGCAGCCTCTGCCAG |
| 5995 | CAUGGAUGCAGUUUCCAUCAG | 11660 | CATGGATGCAGTTTCCATCAG |
| 5996 | CAUGGCUCACUGCAACCUCCA | 11661 | CATGGCTCACTGCAACCTCCA |
| 5997 | CAUGGGCACUGUCCGAAGCCU | 11662 | CATGGGCACTGTCCGAAGCCT |
| 5998 | CAUGGGCUGCUGAUGCACCAU | 11663 | CATGGGCTGCTGATGCACCAT |
| 5999 | CAUGGUUUUUUUUUGUUUUUU | 11664 | CATGGTTTTTTTTTGTTTTTT |
| 6000 | CAUGUCCCUGGCCAGCAGCAU | 11665 | CATGTCCCTGGCCAGCAGCAT |
| 6001 | CAUGUCCUUGCAGUCAUAUUC | 11666 | CATGTCCTTGCAGTCATATTC |
| 6002 | CAUGUUGCAGACUUUGUCCAG | 11667 | CATGTTGCAGACTTTGTCCAG |
| 6003 | CAUGUUUGAGGAUUGUGUCAC | 11668 | CATGTTTGAGGATTGTGTCAC |
| 6004 | CAUGUUUUAAACACAUACCCA | 11669 | CATGTTTTAAACACATACCCA |
| 6005 | CAUUAACGCAGCCAACUUCAU | 11670 | CATTAACGCAGCCAACTTCAT |
| 6006 | CAUUCAGGCCCCCUUUCUUGA | 11671 | CATTCAGGCCCCCTTTCTTGA |
| 6007 | CAUUCAGGCUACAAAAACCUU | 11672 | CATTCAGGCTACAAAAACCTT |
| 6008 | CAUUCAUUGACACGGGCUUUC | 11673 | CATTCATTGACACGGGCTTTC |
| 6009 | CAUUCGCCGCUGUGACACUUG | 11674 | CATTCGCCGCTGTGACACTTG |
| 6010 | CAUUCGUUGGUCCCGCACUCU | 11675 | CATTCGTTGGTCCCGCACTCT |
| 6011 | CAUUCUCCCAAAAAGCGUUGC | 11676 | CATTCTCCCAAAAAGCGTTGC |
| 6012 | CAUUCUCCUGCCUCAGCCUCC | 11677 | CATTCTCCTGCCTCAGCCTCC |
| 6013 | CAUUCUCUGGGACAGGUCAGA | 11678 | CATTCTCTGGGACAGGTCAGA |
| 6014 | CAUUGACACGGGCUUUCCCUG | 11679 | CATTGACACGGGCTTTCCCTG |
| 6015 | CAUUGCAGACGUGGGAACAGC | 11680 | CATTGCAGACGTGGGAACAGC |
| 6016 | CAUUGCAUGGGCACUGUCCGA | 11681 | CATTGCATGGGCACTGTCCGA |
| 6017 | CAUUGCUCAGGGUGGUCCUCU | 11682 | CATTGCTCAGGGTGGTCCTCT |
| 6018 | CAUUGGGCCACUGAAUGUUUU | 11683 | CATTGGGCCACTGAATGTTTT |
| 6019 | CAUUGUCACUAUCUCCACCGU | 11684 | CATTGTCACTATCTCCACCGT |
| 6020 | CAUUUAAGAAAUUUAAUUGAU | 11685 | CATTTAAGAAATTTAATTGAT |
| 6021 | CAUUUACGUGCUCCGAAACCA | 11686 | CATTTACGTGCTCCGAAACCA |
| 6022 | CAUUUCAGAGGCAAUAACCCC | 11687 | CATTTCAGAGGCAATAACCCC |
| 6023 | CAUUUCCCGUCUUGGCACUGG | 11688 | CATTTCCCGTCTTGGCACTGG |
| 6024 | CAUUUCCGACGCCAUGAAUCC | 11689 | CATTTCCGACGCCATGAATCC |
| 6025 | CAUUUCCUCUGCCAGCAACGU | 11690 | CATTTCCTCTGCCAGCAACGT |
| 6026 | CAUUUGCAUAGAAGUGGAAGC | 11691 | CATTTGCATAGAAGTGGAAGC |
| 6027 | CAUUUGGUGAAUGAGUUUGGU | 11692 | CATTTGGTGAATGAGTTTGGT |
| 6028 | CAUUUUUUAAGAGAUGGGGUC | 11693 | CATTTTTTAAGAGATGGGGTC |
| 6029 | CCAAAAAGCGUUGCACACAGU | 11694 | CCAAAAAGCGTTGCACACAGT |
| 6030 | CCAAAAUACUUUGUCCUCAAA | 11695 | CCAAAATACTTTGTCCTCAAA |
| 6031 | CCAAAAUCCCAACCCAAGCCA | 11696 | CCAAAATCCCAACCCAAGCCA |
| 6032 | CCAAAGUGCUGGGAUUACAGG | 11697 | CCAAAGTGCTGGGATTACAGG |
| 6033 | CCAAAUGUACACAGUGUACAA | 11698 | CCAAATGTACACAGTGTACAA |
| 6034 | CCAAAUUCAUUUUUUAAGAGA | 11699 | CCAAATTCATTTTTTAAGAGA |
| 6035 | CCAACAAGUUGACAUCGGAAC | 11700 | CCAACAAGTTGACATCGGAAC |
| 6036 | CCAACACACACGACAGAAAAC | 11701 | CCAACACACACGACAGAAAAC |
| 6037 | CCAACCCAAGCCAUUGCAUGG | 11702 | CCAACCCAAGCCATTGCATGG |
| 6038 | CCAACUCCUGAACUCAAGUGA | 11703 | CCAACTCCTGAACTCAAGTGA |
| 6039 | CCAACUUCAUCGCUCAUGUCC | 11704 | CCAACTTCATCGCTCATGTCC |
| 6040 | CCAAGAUGGUCUUCCGGUUGC | 11705 | CCAAGATGGTCTTCCGGTTGC |
| 6041 | CCAAGCAGUCCCGGUCUGAGU | 11706 | CCAAGCAGTCCCGGTCTGAGT |
| 6042 | CCAAGCAUUCGUUGGUCCCGC | 11707 | CCAAGCATTCGTTGGTCCCGC |
| 6043 | CCAAGCCAUUGCAUGGGCACU | 11708 | CCAAGCCATTGCATGGGCACT |
| 6044 | CCAAGGAGAAGGGGUGGGCCA | 11709 | CCAAGGAGAAGGGGTGGGCCA |
| 6045 | CCAAGGAGGGGGGGGGAGAUU | 11710 | CCAAGGAGGGGGGGGGAGATT |
| 6046 | CCAAGGUAACCGGGUGUCUCA | 11711 | CCAAGGTAACCGGGTGTCTCA |
| 6047 | CCAAGUAGCUGGGAUCACAGG | 11712 | CCAAGTAGCTGGGATCACAGG |
| 6048 | CCAAUAUACAAAGUGCAAACA | 11713 | CCAATATACAAAGTGCAAACA |
| 6049 | CCAAUCCCUUGUGACAUCUUC | 11714 | CCAATCCCTTGTGACATCTTC |
| 6050 | CCACACCAUUCAGGCCCCCUU | 11715 | CCACACCATTCAGGCCCCCTT |
| 6051 | CCACACCUGGGUGCAGGCCAC | 11716 | CCACACCTGGGTGCAGGCCAC |
| 6052 | CCACAGAGCACAGCGGAAACC | 11717 | CCACAGAGCACAGCGGAAACC |
| 6053 | CCACAGCCAGCCCGUCGGGGG | 11718 | CCACAGCCAGCCCGTCGGGGG |
| 6054 | CCACAGCCUUGCAGGCCUUCG | 11719 | CCACAGCCTTGCAGGCCTTCG |
| 6055 | CCACAGCGCAGUUUUCCUCGU | 11720 | CCACAGCGCAGTTTTCCTCGT |
| 6056 | CCACAGCUGAAGUCCCCGGAU | 11721 | CCACAGCTGAAGTCCCCGGAT |
| 6057 | CCACAGCUGGGGGAUGCAGGU | 11722 | CCACAGCTGGGGGATGCAGGT |
| 6058 | CCACAGGACAGCCUUGCUCGU | 11723 | CCACAGGACAGCCTTGCTCGT |
| 6059 | CCACAGGUGAGCACCGGGCAG | 11724 | CCACAGGTGAGCACCGGGCAG |
| 6060 | CCACCACGAUGGCCCUUGGCU | 11725 | CCACCACGATGGCCCTTGGCT |
| 6061 | CCACCACGCCCGGCUAAUUUU | 11726 | CCACCACGCCCGGCTAATTTT |
| 6062 | CCACCACGGAUUCAGCCAGAU | 11727 | CCACCACGGATTCAGCCAGAT |
| 6063 | CCACCAGCUGGAAGCCGUCGG | 11728 | CCACCAGCTGGAAGCCGTCGG |
| 6064 | CCACCAUCACAGCGCCAGCUG | 11729 | CCACCATCACAGCGCCAGCTG |
| 6065 | CCACCCGCCUCGGCCUCCCAA | 11730 | CCACCCGCCTCGGCCTCCCAA |
| 6066 | CCACCCUCCAGGUUCACGCAG | 11731 | CCACCCTCCAGGTTCACGCAG |
| 6067 | CCACCGUACCCAGCUGAUUUU | 11732 | CCACCGTACCCAGCTGATTTT |
| 6068 | CCACCGUGGUGAGCCCAGGGG | 11733 | CCACCGTGGTGAGCCCAGGGG |
| 6069 | CCACCUCAGCCUCGCCAUGCC | 11734 | CCACCTCAGCCTCGCCATGCC |
| 6070 | CCACCUCCGUGUCCAGAGCGA | 11735 | CCACCTCCGTGTCCAGAGCGA |
| 6071 | CCACCUCCUGGGCUCAGGCGA | 11736 | CCACCTCCTGGGCTCAGGCGA |
| 6072 | CCACCUCGAAAGACACUGGGU | 11737 | CCACCTCGAAAGACACTGGGT |
| 6073 | CCACGAUGGCCCUUGGCUUGG | 11738 | CCACGATGGCCCTTGGCTTGG |
| 6074 | CCACGCCCGGCUAAUUUUUUG | 11739 | CCACGCCCGGCTAATTTTTTG |
| 6075 | CCACGGAUUCAGCCAGAUCAU | 11740 | CCACGGATTCAGCCAGATCAT |
| 6076 | CCACGGGAAUGGAAGUGGGUA | 11741 | CCACGGGAATGGAAGTGGGTA |
| 6077 | CCACGUCAUCCUCCAGACUGA | 11742 | CCACGTCATCCTCCAGACTGA |
| 6078 | CCACGUGGCUGAAGAUCUCGG | 11743 | CCACGTGGCTGAAGATCTCGG |
| 6079 | CCACGUGUCCUCACGGCCAAG | 11744 | CCACGTGTCCTCACGGCCAAG |
| 6080 | CCACGUUCCUCAGGUUGGGGA | 11745 | CCACGTTCCTCAGGTTGGGGA |
| 6081 | CCACUAUCUGUACAGGGACGC | 11746 | CCACTATCTGTACAGGGACGC |
| 6082 | CCACUCAUACAUACAACGGGG | 11747 | CCACTCATACATACAACGGGG |
| 6083 | CCACUCAUCCGAGCCAUCUUC | 11748 | CCACTCATCCGAGCCATCTTC |
| 6084 | CCACUGAAUGUUUUCAGUCAC | 11749 | CCACTGAATGTTTTCAGTCAC |
| 6085 | CCACUGAGGAGAUCUAGGGUG | 11750 | CCACTGAGGAGATCTAGGGTG |
| 6086 | CCACUGCAGCCUCAGCCUCUC | 11751 | CCACTGCAGCCTCAGCCTCTC |
| 6087 | CCACUGCAGCCUCAGCCUCUG | 11752 | CCACTGCAGCCTCAGCCTCTG |
| 6088 | CCACUGCAGUCCCCGCCGCGG | 11753 | CCACTGCAGTCCCCGCCGCGG |
| 6089 | CCACUGCGCCCGGCCUCACCG | 11754 | CCACTGCGCCCGGCCTCACCG |
| 6090 | CCACUUAGGCAGUGGAACUCG | 11755 | CCACTTAGGCAGTGGAACTCG |
| 6091 | CCACUUGCUUCUCUGGGCCUG | 11756 | CCACTTGCTTCTCTGGGCCTG |
| 6092 | CCACUUGGCCAUCGCACCUCC | 11757 | CCACTTGGCCATCGCACCTCC |
| 6093 | CCACUUGUAGGAGAUGCAUUU | 11758 | CCACTTGTAGGAGATGCATTT |
| 6094 | CCAGAAAGGCUUAUCACGGUU | 11759 | CCAGAAAGGCTTATCACGGTT |
| 6095 | CCAGAACUGAGGAAUGCAGCG | 11760 | CCAGAACTGAGGAATGCAGCG |
| 6096 | CCAGAAGCCACUCAUACAUAC | 11761 | CCAGAAGCCACTCATACATAC |
| 6097 | CCAGACUGACCAUCGAGGGGU | 11762 | CCAGACTGACCATCGAGGGGT |
| 6098 | CCAGACUGACCAUCUGUCUCG | 11763 | CCAGACTGACCATCTGTCTCG |
| 6099 | CCAGACUGCGGACUGCAGUGG | 11764 | CCAGACTGCGGACTGCAGTGG |
| 6100 | CCAGACUGGAGGAUUUAUUUA | 11765 | CCAGACTGGAGGATTTATTTA |
| 6101 | CCAGAGACCCAGCUCCGUGGC | 11766 | CCAGAGACCCAGCTCCGTGGC |
| 6102 | CCAGAGCGACCACGUUCCUCA | 11767 | CCAGAGCGACCACGTTCCTCA |
| 6103 | CCAGAGCUUGGUGAGACAUUG | 11768 | CCAGAGCTTGGTGAGACATTG |
| 6104 | CCAGAGGCCAUGGGCUGCUGA | 11769 | CCAGAGGCCATGGGCTGCTGA |
| 6105 | CCAGAUCAUUUCCGACGCCAU | 11770 | CCAGATCATTTCCGACGCCAT |
| 6106 | CCAGAUGAAUAAAUAUAUAAA | 11771 | CCAGATGAATAAATATATAAA |
| 6107 | CCAGCAACGUCGCCCAGAGCU | 11772 | CCAGCAACGTCGCCCAGAGCT |
| 6108 | CCAGCAGCAUGCCGUCCGGGC | 11773 | CCAGCAGCATGCCGTCCGGGC |
| 6109 | CCAGCCCCAGGGCCCCAUGCU | 11774 | CCAGCCCCAGGGCCCCATGCT |
| 6110 | CCAGCCCGUCGGGGGCCUGGA | 11775 | CCAGCCCGTCGGGGGCCTGGA |
| 6111 | CCAGCCUCUUUUCAUCCUCCA | 11776 | CCAGCCTCTTTTCATCCTCCA |
| 6112 | CCAGCGAGUAGAUGUCCACAC | 11777 | CCAGCGAGTAGATGTCCACAC |
| 6113 | CCAGCGCAAUUUCCAGCCCCA | 11778 | CCAGCGCAATTTCCAGCCCCA |
| 6114 | CCAGCGUCAUCUUCCUGACCU | 11779 | CCAGCGTCATCTTCCTGACCT |
| 6115 | CCAGCUCAGCCUCCCAAAGUG | 11780 | CCAGCTCAGCCTCCCAAAGTG |
| 6116 | CCAGCUCCGUGGCGAUGGGGA | 11781 | CCAGCTCCGTGGCGATGGGGA |
| 6117 | CCAGCUGAUUUUUAACUUUUU | 11782 | CCAGCTGATTTTTAACTTTTT |
| 6118 | CCAGCUGGAAGCCGUCGGGGC | 11783 | CCAGCTGGAAGCCGTCGGGGC |
| 6119 | CCAGCUGGAAGCCUUCCUCAC | 11784 | CCAGCTGGAAGCCTTCCTCAC |
| 6120 | CCAGCUGGAGUGGAUGCACUC | 11785 | CCAGCTGGAGTGGATGCACTC |
| 6121 | CCAGGACAAGGUGGGGACGGA | 11786 | CCAGGACAAGGTGGGGACGGA |
| 6122 | CCAGGACAGAGUCGGUCCAGU | 11787 | CCAGGACAGAGTCGGTCCAGT |
| 6123 | CCAGGAGGGCCCAGGAUAACG | 11788 | CCAGGAGGGCCCAGGATAACG |
| 6124 | CCAGGAUAACGGAGGGCGACU | 11789 | CCAGGATAACGGAGGGCGACT |
| 6125 | CCAGGAUGGUCUCGAUCUCCU | 11790 | CCAGGATGGTCTCGATCTCCT |
| 6126 | CCAGGCAAAGGAAGACGAGGA | 11791 | CCAGGCAAAGGAAGACGAGGA |
| 6127 | CCAGGCAGAUGUUCACGCCAC | 11792 | CCAGGCAGATGTTCACGCCAC |
| 6128 | CCAGGCAGCCGGGAGGUGUCG | 11793 | CCAGGCAGCCGGGAGGTGTCG |
| 6129 | CCAGGCAGUGUCCCGACCCGG | 11794 | CCAGGCAGTGTCCCGACCCGG |
| 6130 | CCAGGCCAGACUGCGGACUGC | 11795 | CCAGGCCAGACTGCGGACTGC |
| 6131 | CCAGGCUGGAAAGCAGUGGCA | 11796 | CCAGGCTGGAAAGCAGTGGCA |
| 6132 | CCAGGCUGGAGUGCAGUGGCU | 11797 | CCAGGCTGGAGTGCAGTGGCT |
| 6133 | CCAGGCUGGUGUCCUGACAGC | 11798 | CCAGGCTGGTGTCCTGACAGC |
| 6134 | CCAGGGCCCCAUGCUCGCAGC | 11799 | CCAGGGCCCCATGCTCGCAGC |
| 6135 | CCAGGGGGUCCCGUUGGUGCC | 11800 | CCAGGGGGTCCCGTTGGTGCC |
| 6136 | CCAGGGGUGGCCCCAGGCAGC | 11801 | CCAGGGGTGGCCCCAGGCAGC |
| 6137 | CCAGGGUGAUGCAUUCGCCGC | 11802 | CCAGGGTGATGCATTCGCCGC |
| 6138 | CCAGGGUUUGCAAAAAUAAAU | 11803 | CCAGGGTTTGCAAAAATAAAT |
| 6139 | CCAGGUUCACGCAGAGCUGGC | 11804 | CCAGGTTCACGCAGAGCTGGC |
| 6140 | CCAGUACAUGAAGCCAUGAAC | 11805 | CCAGTACATGAAGCCATGAAC |
| 6141 | CCAGUAGAGGCGGCCACUGAG | 11806 | CCAGTAGAGGCGGCCACTGAG |
| 6142 | CCAGUAGAUGUUGCUGUGGAU | 11807 | CCAGTAGATGTTGCTGTGGAT |
| 6143 | CCAGUAGAUUCUAUUGCUGGC | 11808 | CCAGTAGATTCTATTGCTGGC |
| 6144 | CCAGUCAGUCCAGUACAUGAA | 11809 | CCAGTCAGTCCAGTACATGAA |
| 6145 | CCAGUCCACAGCCAGCCCGUC | 11810 | CCAGTCCACAGCCAGCCCGTC |
| 6146 | CCAGUCCCGGCAGUCUCUAGC | 11811 | CCAGTCCCGGCAGTCTCTAGC |
| 6147 | CCAGUGACUCAGGCUCUGCCU | 11812 | CCAGTGACTCAGGCTCTGCCT |
| 6148 | CCAGUUCACUCCUCUUGGCUG | 11813 | CCAGTTCACTCCTCTTGGCTG |
| 6149 | CCAGUUCGUGCAAAUAAUCUU | 11814 | CCAGTTCGTGCAAATAATCTT |
| 6150 | CCAGUUCUUCCAUAGAAGGAA | 11815 | CCAGTTCTTCCATAGAAGGAA |
| 6151 | CCAUAGAAGGAAGACCCCCAG | 11816 | CCATAGAAGGAAGACCCCCAG |
| 6152 | CCAUAUCCUCUGGGGACAGUA | 11817 | CCATATCCTCTGGGGACAGTA |
| 6153 | CCAUCAACGACAAGAUUGGGG | 11818 | CCATCAACGACAAGATTGGGG |
| 6154 | CCAUCACAGCGCCAGCUGGAG | 11819 | CCATCACAGCGCCAGCTGGAG |
| 6155 | CCAUCAGAGCACUGGAAUUCG | 11820 | CCATCAGAGCACTGGAATTCG |
| 6156 | CCAUCCCAACACACACGACAG | 11821 | CCATCCCAACACACACGACAG |
| 6157 | CCAUCCUCCCACCUCAGCCUC | 11822 | CCATCCTCCCACCTCAGCCTC |
| 6158 | CCAUCCUGGCACUCAGCGCUG | 11823 | CCATCCTGGCACTCAGCGCTG |
| 6159 | CCAUCGAGGGGUAGCUGUAGC | 11824 | CCATCGAGGGGTAGCTGTAGC |
| 6160 | CCAUCGCACCUCCAGAACUGA | 11825 | CCATCGCACCTCCAGAACTGA |
| 6161 | CCAUCGCAGACCCACUUGUAG | 11826 | CCATCGCAGACCCACTTGTAG |
| 6162 | CCAUCGUGGCAGCGAAACUCG | 11827 | CCATCGTGGCAGCGAAACTCG |
| 6163 | CCAUCUCCCAGAAGCCACUCA | 11828 | CCATCTCCCAGAAGCCACTCA |
| 6164 | CCAUCUGCUGUUGUGUGUUGA | 11829 | CCATCTGCTGTTGTGTGTTGA |
| 6165 | CCAUCUGUCUCGAGGGGUAGC | 11830 | CCATCTGTCTCGAGGGGTAGC |
| 6166 | CCAUCUUCGCAGUCGGGGUCG | 11831 | CCATCTTCGCAGTCGGGGTCG |
| 6167 | CCAUGAACAGGAUCCACCACG | 11832 | CCATGAACAGGATCCACCACG |
| 6168 | CCAUGAAUCCCUUUCCUGGCU | 11833 | CCATGAATCCCTTTCCTGGCT |
| 6169 | CCAUGCAUGGUUUUUUUUUGU | 11834 | CCATGCATGGTTTTTTTTTGT |
| 6170 | CCAUGCCUGGCCAGAGGCCAU | 11835 | CCATGCCTGGCCAGAGGCCAT |
| 6171 | CCAUGCUCGCAGCCUCUGCCA | 11836 | CCATGCTCGCAGCCTCTGCCA |
| 6172 | CCAUGGAUGCAGUUUCCAUCA | 11837 | CCATGGATGCAGTTTCCATCA |
| 6173 | CCAUGGGCUGCUGAUGCACCA | 11838 | CCATGGGCTGCTGATGCACCA |
| 6174 | CCAUGUUGCAGACUUUGUCCA | 11839 | CCATGTTGCAGACTTTGTCCA |
| 6175 | CCAUGUUUGAGGAUUGUGUCA | 11840 | CCATGTTTGAGGATTGTGTCA |
| 6176 | CCAUUCAGGCCCCCUUUCUUG | 11841 | CCATTCAGGCCCCCTTTCTTG |
| 6177 | CCAUUCUCCUGCCUCAGCCUC | 11842 | CCATTCTCCTGCCTCAGCCTC |
| 6178 | CCAUUGCAUGGGCACUGUCCG | 11843 | CCATTGCATGGGCACTGTCCG |
| 6179 | CCAUUGCUCAGGGUGGUCCUC | 11844 | CCATTGCTCAGGGTGGTCCTC |
| 6180 | CCAUUGGGCCACUGAAUGUUU | 11845 | CCATTGGGCCACTGAATGTTT |
| 6181 | CCCAAAAAGCGUUGCACACAG | 11846 | CCCAAAAAGCGTTGCACACAG |
| 6182 | CCCAAAGUGCUGGGAUUACAG | 11847 | CCCAAAGTGCTGGGATTACAG |
| 6183 | CCCAACACACACGACAGAAAA | 11848 | CCCAACACACACGACAGAAAA |
| 6184 | CCCAACCCAAGCCAUUGCAUG | 11849 | CCCAACCCAAGCCATTGCATG |
| 6185 | CCCAAGCCAUUGCAUGGGCAC | 11850 | CCCAAGCCATTGCATGGGCAC |
| 6186 | CCCAAGUAGCUGGGAUCACAG | 11851 | CCCAAGTAGCTGGGATCACAG |
| 6187 | CCCACAGCCUUGCAGGCCUUC | 11852 | CCCACAGCCTTGCAGGCCTTC |
| 6188 | CCCACAGCUGAAGUCCCCGGA | 11853 | CCCACAGCTGAAGTCCCCGGA |
| 6189 | CCCACAGCUGGGGGAUGCAGG | 11854 | CCCACAGCTGGGGGATGCAGG |
| 6190 | CCCACCUCAGCCUCGCCAUGC | 11855 | CCCACCTCAGCCTCGCCATGC |
| 6191 | CCCACCUCGAAAGACACUGGG | 11856 | CCCACCTCGAAAGACACTGGG |
| 6192 | CCCACGUGGCUGAAGAUCUCG | 11857 | CCCACGTGGCTGAAGATCTCG |
| 6193 | CCCACUAUCUGUACAGGGACG | 11858 | CCCACTATCTGTACAGGGACG |
| 6194 | CCCACUGCAGUCCCCGCCGCG | 11859 | CCCACTGCAGTCCCCGCCGCG |
| 6195 | CCCACUUGUAGGAGAUGCAUU | 11860 | CCCACTTGTAGGAGATGCATT |
| 6196 | CCCAGAAGCCACUCAUACAUA | 11861 | CCCAGAAGCCACTCATACATA |
| 6197 | CCCAGAGCUUGGUGAGACAUU | 11862 | CCCAGAGCTTGGTGAGACATT |
| 6198 | CCCAGAUGAAUAAAUAUAUAA | 11863 | CCCAGATGAATAAATATATAA |
| 6199 | CCCAGCUCCGUGGCGAUGGGG | 11864 | CCCAGCTCCGTGGCGATGGGG |
| 6200 | CCCAGCUGAUUUUUAACUUUU | 11865 | CCCAGCTGATTTTTAACTTTT |
| 6201 | CCCAGGACAAGGUGGGGACGG | 11866 | CCCAGGACAAGGTGGGGACGG |
| 6202 | CCCAGGACAGAGUCGGUCCAG | 11867 | CCCAGGACAGAGTCGGTCCAG |
| 6203 | CCCAGGAUAACGGAGGGCGAC | 11868 | CCCAGGATAACGGAGGGCGAC |
| 6204 | CCCAGGCAAAGGAAGACGAGG | 11869 | CCCAGGCAAAGGAAGACGAGG |
| 6205 | CCCAGGCAGCCGGGAGGUGUC | 11870 | CCCAGGCAGCCGGGAGGTGTC |
| 6206 | CCCAGGCCAGACUGCGGACUG | 11871 | CCCAGGCCAGACTGCGGACTG |
| 6207 | CCCAGGCUGGAAAGCAGUGGC | 11872 | CCCAGGCTGGAAAGCAGTGGC |
| 6208 | CCCAGGCUGGAGUGCAGUGGC | 11873 | CCCAGGCTGGAGTGCAGTGGC |
| 6209 | CCCAGGGCCCCAUGCUCGCAG | 11874 | CCCAGGGCCCCATGCTCGCAG |
| 6210 | CCCAGGGGUGGCCCCAGGCAG | 11875 | CCCAGGGGTGGCCCCAGGCAG |
| 6211 | CCCAGUAGAGGCGGCCACUGA | 11876 | CCCAGTAGAGGCGGCCACTGA |
| 6212 | CCCAGUCAGUCCAGUACAUGA | 11877 | CCCAGTCAGTCCAGTACATGA |
| 6213 | CCCAUCAACGACAAGAUUGGG | 11878 | CCCATCAACGACAAGATTGGG |
| 6214 | CCCAUCCCAACACACACGACA | 11879 | CCCATCCCAACACACACGACA |
| 6215 | CCCAUCGUGGCAGCGAAACUC | 11880 | CCCATCGTGGCAGCGAAACTC |
| 6216 | CCCAUCUCCCAGAAGCCACUC | 11881 | CCCATCTCCCAGAAGCCACTC |
| 6217 | CCCAUGCUCGCAGCCUCUGCC | 11882 | CCCATGCTCGCAGCCTCTGCC |
| 6218 | CCCCACAGCUGAAGUCCCCGG | 11883 | CCCCACAGCTGAAGTCCCCGG |
| 6219 | CCCCACUAUCUGUACAGGGAC | 11884 | CCCCACTATCTGTACAGGGAC |
| 6220 | CCCCAGGACAAGGUGGGGACG | 11885 | CCCCAGGACAAGGTGGGGACG |
| 6221 | CCCCAGGCAAAGGAAGACGAG | 11886 | CCCCAGGCAAAGGAAGACGAG |
| 6222 | CCCCAGGCAGCCGGGAGGUGU | 11887 | CCCCAGGCAGCCGGGAGGTGT |
| 6223 | CCCCAGGGCCCCAUGCUCGCA | 11888 | CCCCAGGGCCCCATGCTCGCA |
| 6224 | CCCCAGUCAGUCCAGUACAUG | 11889 | CCCCAGTCAGTCCAGTACATG |
| 6225 | CCCCAUGCUCGCAGCCUCUGC | 11890 | CCCCATGCTCGCAGCCTCTGC |
| 6226 | CCCCCACAGCUGAAGUCCCCG | 11891 | CCCCCACAGCTGAAGTCCCCG |
| 6227 | CCCCCAGGACAAGGUGGGGAC | 11892 | CCCCCAGGACAAGGTGGGGAC |
| 6228 | CCCCCAGGCAAAGGAAGACGA | 11893 | CCCCCAGGCAAAGGAAGACGA |
| 6229 | CCCCCCAGGACAAGGUGGGGA | 11894 | CCCCCCAGGACAAGGTGGGGA |
| 6230 | CCCCCCGGGCCUGUUUCUCUU | 11895 | CCCCCCGGGCCTGTTTCTCTT |
| 6231 | CCCCCGAGACCAGAGACCCAG | 11896 | CCCCCGAGACCAGAGACCCAG |
| 6232 | CCCCCGGGCCUGUUUCUCUUA | 11897 | CCCCCGGGCCTGTTTCTCTTA |
| 6233 | CCCCCGUUGACAUCGAUGCUU | 11898 | CCCCCGTTGACATCGATGCTT |
| 6234 | CCCCCUACACAGGGCCCCGAG | 11899 | CCCCCTACACAGGGCCCCGAG |
| 6235 | CCCCCUUUCUUGAUCUUGGCG | 11900 | CCCCCTTTCTTGATCTTGGCG |
| 6236 | CCCCGAGAAUAGUCACUGAAC | 11901 | CCCCGAGAATAGTCACTGAAC |
| 6237 | CCCCGAGACCAGAGACCCAGC | 11902 | CCCCGAGACCAGAGACCCAGC |
| 6238 | CCCCGCCGCGGCGAGGAGCAA | 11903 | CCCCGCCGCGGCGAGGAGCAA |
| 6239 | CCCCGGAUUUGCAGGUGACAG | 11904 | CCCCGGATTTGCAGGTGACAG |
| 6240 | CCCCGGCAUUCAUUGACACGG | 11905 | CCCCGGCATTCATTGACACGG |
| 6241 | CCCCGGGCCUGUUUCUCUUAU | 11906 | CCCCGGGCCTGTTTCTCTTAT |
| 6242 | CCCCGUUGACAUCGAUGCUUG | 11907 | CCCCGTTGACATCGATGCTTG |
| 6243 | CCCCUACACAGGGCCCCGAGA | 11908 | CCCCTACACAGGGCCCCGAGA |
| 6244 | CCCCUACAGCGCUGCGGCCAC | 11909 | CCCCTACAGCGCTGCGGCCAC |
| 6245 | CCCCUCCCCUUUCAUCUUCCA | 11910 | CCCCTCCCCTTTCATCTTCCA |
| 6246 | CCCCUCUCUGUCCCCGGCAUU | 11911 | CCCCTCTCTGTCCCCGGCATT |
| 6247 | CCCCUCUGUGAACUUGAUCGG | 11912 | CCCCTCTGTGAACTTGATCGG |
| 6248 | CCCCUUGGAACACGUAAAGAC | 11913 | CCCCTTGGAACACGTAAAGAC |
| 6249 | CCCCUUUCAUCUUCCAUGUUU | 11914 | CCCCTTTCATCTTCCATGTTT |
| 6250 | CCCCUUUCUUGAUCUUGGCGG | 11915 | CCCCTTTCTTGATCTTGGCGG |
| 6251 | CCCGACCCGGAUCACGACCUG | 11916 | CCCGACCCGGATCACGACCTG |
| 6252 | CCCGAGAAUAGUCACUGAACA | 11917 | CCCGAGAATAGTCACTGAACA |
| 6253 | CCCGAGACCAGAGACCCAGCU | 11918 | CCCGAGACCAGAGACCCAGCT |
| 6254 | CCCGAGUAGCUGGGACUACAG | 11919 | CCCGAGTAGCTGGGACTACAG |
| 6255 | CCCGCACUCUUUGAUGGGUUC | 11920 | CCCGCACTCTTTGATGGGTTC |
| 6256 | CCCGCCACCACGCCCGGCUAA | 11921 | CCCGCCACCACGCCCGGCTAA |
| 6257 | CCCGCCGCGGCGAGGAGCAAG | 11922 | CCCGCCGCGGCGAGGAGCAAG |
| 6258 | CCCGCCUCGGCCUCCCAAAGU | 11923 | CCCGCCTCGGCCTCCCAAAGT |
| 6259 | CCCGGAUCACGACCUGCUGUG | 11924 | CCCGGATCACGACCTGCTGTG |
| 6260 | CCCGGAUUUGCAGGUGACAGA | 11925 | CCCGGATTTGCAGGTGACAGA |
| 6261 | CCCGGCAGUCUCUAGCCAUGU | 11926 | CCCGGCAGTCTCTAGCCATGT |
| 6262 | CCCGGCAUUCAUUGACACGGG | 11927 | CCCGGCATTCATTGACACGGG |
| 6263 | CCCGGCCUCACCGUGCAUGUU | 11928 | CCCGGCCTCACCGTGCATGTT |
| 6264 | CCCGGCUAAUUUUUUGUAUUU | 11929 | CCCGGCTAATTTTTTGTATTT |
| 6265 | CCCGGGACUUGUCGUCGCCUU | 11930 | CCCGGGACTTGTCGTCGCCTT |
| 6266 | CCCGGGCCUGUUUCUCUUAUC | 11931 | CCCGGGCCTGTTTCTCTTATC |
| 6267 | CCCGGGUUCACACCAUUCUCC | 11932 | CCCGGGTTCACACCATTCTCC |
| 6268 | CCCGGUCAACCUGCCCCUCUC | 11933 | CCCGGTCAACCTGCCCCTCTC |
| 6269 | CCCGGUCACACUGCCGGCUGC | 11934 | CCCGGTCACACTGCCGGCTGC |
| 6270 | CCCGGUCUGAGUCACAGACGA | 11935 | CCCGGTCTGAGTCACAGACGA |
| 6271 | CCCGUCAAACGAUCCAGACUG | 11936 | CCCGTCAAACGATCCAGACTG |
| 6272 | CCCGUCGGGGGCCUGGAUGUC | 11937 | CCCGTCGGGGGCCTGGATGTC |
| 6273 | CCCGUCUUGGCACUGGAACUC | 11938 | CCCGTCTTGGCACTGGAACTC |
| 6274 | CCCGUUGACAUCGAUGCUUGA | 11939 | CCCGTTGACATCGATGCTTGA |
| 6275 | CCCGUUGGUGCCAUCUGCUGU | 11940 | CCCGTTGGTGCCATCTGCTGT |
| 6276 | CCCUACACAGGGCCCCGAGAA | 11941 | CCCTACACAGGGCCCCGAGAA |
| 6277 | CCCUACAGCGCUGCGGCCACU | 11942 | CCCTACAGCGCTGCGGCCACT |
| 6278 | CCCUCACGCUACUGGGCUUCU | 11943 | CCCTCACGCTACTGGGCTTCT |
| 6279 | CCCUCCAGGUUCACGCAGAGC | 11944 | CCCTCCAGGTTCACGCAGAGC |
| 6280 | CCCUCCCCUUUCAUCUUCCAU | 11945 | CCCTCCCCTTTCATCTTCCAT |
| 6281 | CCCUCGCAGAGUGUCACAUUA | 11946 | CCCTCGCAGAGTGTCACATTA |
| 6282 | CCCUCGCAGAGUGUCAGACAG | 11947 | CCCTCGCAGAGTGTCAGACAG |
| 6283 | CCCUCUCUGUCCCCGGCAUUC | 11948 | CCCTCTCTGTCCCCGGCATTC |
| 6284 | CCCUCUGUGAACUUGAUCGGG | 11949 | CCCTCTGTGAACTTGATCGGG |
| 6285 | CCCUGAAUAACGUUUUCCUCU | 11950 | CCCTGAATAACGTTTTCCTCT |
| 6286 | CCCUGCACUGGGGGGGACACA | 11951 | CCCTGCACTGGGGGGGACACA |
| 6287 | CCCUGGCCAGCAGCAUGCCGU | 11952 | CCCTGGCCAGCAGCATGCCGT |
| 6288 | CCCUGGCCUGGGAUCCCAUCC | 11953 | CCCTGGCCTGGGATCCCATCC |
| 6289 | CCCUGGCUUCCCGCGAUUGCA | 11954 | CCCTGGCTTCCCGCGATTGCA |
| 6290 | CCCUGGGGACAAUUGCCAAUC | 11955 | CCCTGGGGACAATTGCCAATC |
| 6291 | CCCUUGGAACACGUAAAGACC | 11956 | CCCTTGGAACACGTAAAGACC |
| 6292 | CCCUUGGCUUGGAGCCGUUCU | 11957 | CCCTTGGCTTGGAGCCGTTCT |
| 6293 | CCCUUGGUAUCCGCAACAGAG | 11958 | CCCTTGGTATCCGCAACAGAG |
| 6294 | CCCUUGUGACAUCUUCACGCG | 11959 | CCCTTGTGACATCTTCACGCG |
| 6295 | CCCUUUCAUCUUCCAUGUUUG | 11960 | CCCTTTCATCTTCCATGTTTG |
| 6296 | CCCUUUCCUGGCUUAAGGAAG | 11961 | CCCTTTCCTGGCTTAAGGAAG |
| 6297 | CCCUUUCUUGAUCUUGGCGGG | 11962 | CCCTTTCTTGATCTTGGCGGG |
| 6298 | CCGAAACCAGAAAGGCUUAUC | 11963 | CCGAAACCAGAAAGGCTTATC |
| 6299 | CCGAAGCCUGUUCUGCCUCCC | 11964 | CCGAAGCCTGTTCTGCCTCCC |
| 6300 | CCGACCCGGAUCACGACCUGC | 11965 | CCGACCCGGATCACGACCTGC |
| 6301 | CCGACGCCAUGAAUCCCUUUC | 11966 | CCGACGCCATGAATCCCTTTC |
| 6302 | CCGAGAAUAGUCACUGAACAA | 11967 | CCGAGAATAGTCACTGAACAA |
| 6303 | CCGAGACCAGAGACCCAGCUC | 11968 | CCGAGACCAGAGACCCAGCTC |
| 6304 | CCGAGAGAUGCACUUCCCAUC | 11969 | CCGAGAGATGCACTTCCCATC |
| 6305 | CCGAGCAGGGGCUACUGUCCC | 11970 | CCGAGCAGGGGCTACTGTCCC |
| 6306 | CCGAGCCAUCUUCGCAGUCGG | 11971 | CCGAGCCATCTTCGCAGTCGG |
| 6307 | CCGAGGCCUUGAGGGUGGCCG | 11972 | CCGAGGCCTTGAGGGTGGCCG |
| 6308 | CCGAGUAGCUGGGACUACAGG | 11973 | CCGAGTAGCTGGGACTACAGG |
| 6309 | CCGAUCUUAAGGUCAUUGCAG | 11974 | CCGATCTTAAGGTCATTGCAG |
| 6310 | CCGCAACAGAGACAGUGCCCA | 11975 | CCGCAACAGAGACAGTGCCCA |
| 6311 | CCGCACUCUUUGAUGGGUUCA | 11976 | CCGCACTCTTTGATGGGTTCA |
| 6312 | CCGCCACCACGCCCGGCUAAU | 11977 | CCGCCACCACGCCCGGCTAAT |
| 6313 | CCGCCAGUUCUUCCAUAGAAG | 11978 | CCGCCAGTTCTTCCATAGAAG |
| 6314 | CCGCCAUUGCUCAGGGUGGUC | 11979 | CCGCCATTGCTCAGGGTGGTC |
| 6315 | CCGCCGCGGCGAGGAGCAAGG | 11980 | CCGCCGCGGCGAGGAGCAAGG |
| 6316 | CCGCCGUUGUUGUCCAAGCAU | 11981 | CCGCCGTTGTTGTCCAAGCAT |
| 6317 | CCGCCUCGGCCUCCCAAAGUG | 11982 | CCGCCTCGGCCTCCCAAAGTG |
| 6318 | CCGCGGAGGAACGCCAGGCCU | 11983 | CCGCGGAGGAACGCCAGGCCT |
| 6319 | CCGCGGCGAGGAGCAAGGCGA | 11984 | CCGCGGCGAGGAGCAAGGCGA |
| 6320 | CCGCUGUGACACUUGAACUUG | 11985 | CCGCTGTGACACTTGAACTTG |
| 6321 | CCGCUUCCCGGGUUCACACCA | 11986 | CCGCTTCCCGGGTTCACACCA |
| 6322 | CCGGACAUCAGUGCAACAGUA | 11987 | CCGGACATCAGTGCAACAGTA |
| 6323 | CCGGAUCACGACCUGCUGUGU | 11988 | CCGGATCACGACCTGCTGTGT |
| 6324 | CCGGAUUUGCAGGUGACAGAC | 11989 | CCGGATTTGCAGGTGACAGAC |
| 6325 | CCGGCAGUCUCUAGCCAUGUU | 11990 | CCGGCAGTCTCTAGCCATGTT |
| 6326 | CCGGCAUUCAUUGACACGGGC | 11991 | CCGGCATTCATTGACACGGGC |
| 6327 | CCGGCCUCACCGUGCAUGUUU | 11992 | CCGGCCTCACCGTGCATGTTT |
| 6328 | CCGGCGAGGUCUCAGGAAGGG | 11993 | CCGGCGAGGTCTCAGGAAGGG |
| 6329 | CCGGCUAAUUUUUUGUAUUUU | 11994 | CCGGCTAATTTTTTGTATTTT |
| 6330 | CCGGCUGCCAUGGAUGCAGUU | 11995 | CCGGCTGCCATGGATGCAGTT |
| 6331 | CCGGGACUUGUCGUCGCCUUU | 11996 | CCGGGACTTGTCGTCGCCTTT |
| 6332 | CCGGGAGGUGUCGGGAACAGG | 11997 | CCGGGAGGTGTCGGGAACAGG |
| 6333 | CCGGGCAGGAGGCCUCGUCUG | 11998 | CCGGGCAGGAGGCCTCGTCTG |
| 6334 | CCGGGCAGGCGCAGGUAAACU | 11999 | CCGGGCAGGCGCAGGTAAACT |
| 6335 | CCGGGCCUGUUUCUCUUAUCC | 12000 | CCGGGCCTGTTTCTCTTATCC |
| 6336 | CCGGGGACCCGGGACUUGUCG | 12001 | CCGGGGACCCGGGACTTGTCG |
| 6337 | CCGGGGACUUCGCCAGGAGGG | 12002 | CCGGGGACTTCGCCAGGAGGG |
| 6338 | CCGGGGGCCCCUCUGUGAACU | 12003 | CCGGGGGCCCCTCTGTGAACT |
| 6339 | CCGGGUGUCUCAGGCACUUAA | 12004 | CCGGGTGTCTCAGGCACTTAA |
| 6340 | CCGGGUUCACACCAUUCUCCU | 12005 | CCGGGTTCACACCATTCTCCT |
| 6341 | CCGGUCAACCUGCCCCUCUCU | 12006 | CCGGTCAACCTGCCCCTCTCT |
| 6342 | CCGGUCACACUGCCGGCUGCC | 12007 | CCGGTCACACTGCCGGCTGCC |
| 6343 | CCGGUCCAGCGUCAUCUUCCU | 12008 | CCGGTCCAGCGTCATCTTCCT |
| 6344 | CCGGUCUGAGUCACAGACGAA | 12009 | CCGGTCTGAGTCACAGACGAA |
| 6345 | CCGGUUGCCCCCGUUGACAUC | 12010 | CCGGTTGCCCCCGTTGACATC |
| 6346 | CCGGUUGGUGAAGAAGAGGUA | 12011 | CCGGTTGGTGAAGAAGAGGTA |
| 6347 | CCGUACCCAGCUGAUUUUUAA | 12012 | CCGTACCCAGCTGATTTTTAA |
| 6348 | CCGUCAAACGAUCCAGACUGG | 12013 | CCGTCAAACGATCCAGACTGG |
| 6349 | CCGUCCAAGCAGUCCCGGUCU | 12014 | CCGTCCAAGCAGTCCCGGTCT |
| 6350 | CCGUCCGGGCAGGCGCAGGUA | 12015 | CCGTCCGGGCAGGCGCAGGTA |
| 6351 | CCGUCCUGGUUGUGGCAAAUG | 12016 | CCGTCCTGGTTGTGGCAAATG |
| 6352 | CCGUCGGGGCACAGGCACUCG | 12017 | CCGTCGGGGCACAGGCACTCG |
| 6353 | CCGUCGGGGGCCUGGAUGUCU | 12018 | CCGTCGGGGGCCTGGATGTCT |
| 6354 | CCGUCUUGGCACUGGAACUCG | 12019 | CCGTCTTGGCACTGGAACTCG |
| 6355 | CCGUGCAUGUUUUAAACACAU | 12020 | CCGTGCATGTTTTAAACACAT |
| 6356 | CCGUGGCGAUGGGGAGGACAA | 12021 | CCGTGGCGATGGGGAGGACAA |
| 6357 | CCGUGGGCUCUGUCAAGCUGG | 12022 | CCGTGGGCTCTGTCAAGCTGG |
| 6358 | CCGUGGUGAGCCCAGGGGUGG | 12023 | CCGTGGTGAGCCCAGGGGTGG |
| 6359 | CCGUGUCCAGAGCGACCACGU | 12024 | CCGTGTCCAGAGCGACCACGT |
| 6360 | CCGUUCUCCCUGAAUAACGUU | 12025 | CCGTTCTCCCTGAATAACGTT |
| 6361 | CCGUUGACAUCGAUGCUUGAG | 12026 | CCGTTGACATCGATGCTTGAG |
| 6362 | CCGUUGGUGCCAUCUGCUGUU | 12027 | CCGTTGGTGCCATCTGCTGTT |
| 6363 | CCGUUGUCGCAGUCCACUUGG | 12028 | CCGTTGTCGCAGTCCACTTGG |
| 6364 | CCGUUGUUGUCCAAGCAUUCG | 12029 | CCGTTGTTGTCCAAGCATTCG |
| 6365 | CCUACACAGGGCCCCGAGAAU | 12030 | CCTACACAGGGCCCCGAGAAT |
| 6366 | CCUACAGCGCUGCGGCCACUC | 12031 | CCTACAGCGCTGCGGCCACTC |
| 6367 | CCUAGCUGGAAACCCUGGCUU | 12032 | CCTAGCTGGAAACCCTGGCTT |
| 6368 | CCUCAAAGACGGCCAAGGAGA | 12033 | CCTCAAAGACGGCCAAGGAGA |
| 6369 | CCUCAAAUGCCUGAGCUCAAA | 12034 | CCTCAAATGCCTGAGCTCAAA |
| 6370 | CCUCACACUGGCACUUGUAGC | 12035 | CCTCACACTGGCACTTGTAGC |
| 6371 | CCUCACCGUGCAUGUUUUAAA | 12036 | CCTCACCGTGCATGTTTTAAA |
| 6372 | CCUCACGCUACUGGGCUUCUU | 12037 | CCTCACGCTACTGGGCTTCTT |
| 6373 | CCUCACGGCCAAGGUAACCGG | 12038 | CCTCACGGCCAAGGTAACCGG |
| 6374 | CCUCAGCCUCCCAAGUAGCUG | 12039 | CCTCAGCCTCCCAAGTAGCTG |
| 6375 | CCUCAGCCUCCCGAGUAGCUG | 12040 | CCTCAGCCTCCCGAGTAGCTG |
| 6376 | CCUCAGCCUCGCCAUGCCUGG | 12041 | CCTCAGCCTCGCCATGCCTGG |
| 6377 | CCUCAGCCUCUCUUGGCUGGG | 12042 | CCTCAGCCTCTCTTGGCTGGG |
| 6378 | CCUCAGCCUCUGUGAGGCAGC | 12043 | CCTCAGCCTCTGTGAGGCAGC |
| 6379 | CCUCAGGUUGGGGAUGAGGCU | 12044 | CCTCAGGTTGGGGATGAGGCT |
| 6380 | CCUCAUCCUCUGUGGUCUUCU | 12045 | CCTCATCCTCTGTGGTCTTCT |
| 6381 | CCUCAUGAUCCACCCGCCUCG | 12046 | CCTCATGATCCACCCGCCTCG |
| 6382 | CCUCAUGUCCCUGGCCAGCAG | 12047 | CCTCATGTCCCTGGCCAGCAG |
| 6383 | CCUCCAAGAUGGUCUUCCGGU | 12048 | CCTCCAAGATGGTCTTCCGGT |
| 6384 | CCUCCACCUCCUGGGCUCAGG | 12049 | CCTCCACCTCCTGGGCTCAGG |
| 6385 | CCUCCAGAACUGAGGAAUGCA | 12050 | CCTCCAGAACTGAGGAATGCA |
| 6386 | CCUCCAGACUGACCAUCGAGG | 12051 | CCTCCAGACTGACCATCGAGG |
| 6387 | CCUCCAGACUGACCAUCUGUC | 12052 | CCTCCAGACTGACCATCTGTC |
| 6388 | CCUCCAGGUUCACGCAGAGCU | 12053 | CCTCCAGGTTCACGCAGAGCT |
| 6389 | CCUCCCAAAGUGCUGGGAUUA | 12054 | CCTCCCAAAGTGCTGGGATTA |
| 6390 | CCUCCCAAGUAGCUGGGAUCA | 12055 | CCTCCCAAGTAGCTGGGATCA |
| 6391 | CCUCCCACCUCAGCCUCGCCA | 12056 | CCTCCCACCTCAGCCTCGCCA |
| 6392 | CCUCCCAGAUGAAUAAAUAUA | 12057 | CCTCCCAGATGAATAAATATA |
| 6393 | CCUCCCCUUUCAUCUUCCAUG | 12058 | CCTCCCCTTTCATCTTCCATG |
| 6394 | CCUCCCGAGUAGCUGGGACUA | 12059 | CCTCCCGAGTAGCTGGGACTA |
| 6395 | CCUCCGUGUCCAGAGCGACCA | 12060 | CCTCCGTGTCCAGAGCGACCA |
| 6396 | CCUCCUGCCUCAGCCUCCCAA | 12061 | CCTCCTGCCTCAGCCTCCCAA |
| 6397 | CCUCCUGGGCUCAGGCGAUCC | 12062 | CCTCCTGGGCTCAGGCGATCC |
| 6398 | CCUCGAAAGACACUGGGUGGG | 12063 | CCTCGAAAGACACTGGGTGGG |
| 6399 | CCUCGCAGAGUGUCACAUUAA | 12064 | CCTCGCAGAGTGTCACATTAA |
| 6400 | CCUCGCAGAGUGUCAGACAGC | 12065 | CCTCGCAGAGTGTCAGACAGC |
| 6401 | CCUCGCCAUGCCUGGCCAGAG | 12066 | CCTCGCCATGCCTGGCCAGAG |
| 6402 | CCUCGGCCUCCCAAAGUGCUG | 12067 | CCTCGGCCTCCCAAAGTGCTG |
| 6403 | CCUCGUAAGGAACCGAGGCCU | 12068 | CCTCGTAAGGAACCGAGGCCT |
| 6404 | CCUCGUCAGAUUUGUCCUUGC | 12069 | CCTCGTCAGATTTGTCCTTGC |
| 6405 | CCUCGUCUGAGCCGUCCAAGC | 12070 | CCTCGTCTGAGCCGTCCAAGC |
| 6406 | CCUCGUGCCGGUUGGUGAAGA | 12071 | CCTCGTGCCGGTTGGTGAAGA |
| 6407 | CCUCUCACACCAGUUCACUCC | 12072 | CCTCTCACACCAGTTCACTCC |
| 6408 | CCUCUCUGUCCCCGGCAUUCA | 12073 | CCTCTCTGTCCCCGGCATTCA |
| 6409 | CCUCUCUUGGCUGGGUGAGGU | 12074 | CCTCTCTTGGCTGGGTGAGGT |
| 6410 | CCUCUGCCAGCAACGUCGCCC | 12075 | CCTCTGCCAGCAACGTCGCCC |
| 6411 | CCUCUGCCAGGCAGUGUCCCG | 12076 | CCTCTGCCAGGCAGTGTCCCG |
| 6412 | CCUCUGGGAAGUGGCAUCAUU | 12077 | CCTCTGGGAAGTGGCATCATT |
| 6413 | CCUCUGGGGACAGUAGGUUUU | 12078 | CCTCTGGGGACAGTAGGTTTT |
| 6414 | CCUCUGUGAACUUGAUCGGGG | 12079 | CCTCTGTGAACTTGATCGGGG |
| 6415 | CCUCUGUGAGGCAGCUCCUCA | 12080 | CCTCTGTGAGGCAGCTCCTCA |
| 6416 | CCUCUGUGGUCUUCUGAUAGA | 12081 | CCTCTGTGGTCTTCTGATAGA |
| 6417 | CCUCUUCACGCCCUUGGUAUC | 12082 | CCTCTTCACGCCCTTGGTATC |
| 6418 | CCUCUUGGCUGGGUGAGGUUG | 12083 | CCTCTTGGCTGGGTGAGGTTG |
| 6419 | CCUCUUUUCAUCCUCCAAGAU | 12084 | CCTCTTTTCATCCTCCAAGAT |
| 6420 | CCUGAACUCAAGUGAUCCAGC | 12085 | CCTGAACTCAAGTGATCCAGC |
| 6421 | CCUGAAGUCCCGUCAAACGAU | 12086 | CCTGAAGTCCCGTCAAACGAT |
| 6422 | CCUGAAUAACGUUUUCCUCUU | 12087 | CCTGAATAACGTTTTCCTCTT |
| 6423 | CCUGACACUCAUCGAUAUCGC | 12088 | CCTGACACTCATCGATATCGC |
| 6424 | CCUGACACUCAUCGAUAUCUU | 12089 | CCTGACACTCATCGATATCTT |
| 6425 | CCUGACAGCCACACCUGGGUG | 12090 | CCTGACAGCCACACCTGGGTG |
| 6426 | CCUGACAUCCCCUCCCCUUUC | 12091 | CCTGACATCCCCTCCCCTTTC |
| 6427 | CCUGACCUCAUGAUCCACCCG | 12092 | CCTGACCTCATGATCCACCCG |
| 6428 | CCUGACCUCGUGCCGGUUGGU | 12093 | CCTGACCTCGTGCCGGTTGGT |
| 6429 | CCUGACGGUGGAUGUCUCCUG | 12094 | CCTGACGGTGGATGTCTCCTG |
| 6430 | CCUGAGCUCAAACCAUCCUCC | 12095 | CCTGAGCTCAAACCATCCTCC |
| 6431 | CCUGAGUUUAGGGGUUUGGCU | 12096 | CCTGAGTTTAGGGGTTTGGCT |
| 6432 | CCUGCACUGGGGGGGACACAG | 12097 | CCTGCACTGGGGGGGACACAG |
| 6433 | CCUGCCCCUCUCUGUCCCCGG | 12098 | CCTGCCCCTCTCTGTCCCCGG |
| 6434 | CCUGCCUCAGCCUCCCAAGUA | 12099 | CCTGCCTCAGCCTCCCAAGTA |
| 6435 | CCUGCCUCAGCCUCCCGAGUA | 12100 | CCTGCCTCAGCCTCCCGAGTA |
| 6436 | CCUGCUGUGUCCUAGCUGGAA | 12101 | CCTGCTGTGTCCTAGCTGGAA |
| 6437 | CCUGGAGAGAAAUGGAGGUGU | 12102 | CCTGGAGAGAAATGGAGGTGT |
| 6438 | CCUGGAUGUCUCUGCUGAUGA | 12103 | CCTGGATGTCTCTGCTGATGA |
| 6439 | CCUGGCACUCAGCGCUGCCAU | 12104 | CCTGGCACTCAGCGCTGCCAT |
| 6440 | CCUGGCCAGAGGCCAUGGGCU | 12105 | CCTGGCCAGAGGCCATGGGCT |
| 6441 | CCUGGCCAGCAGCAUGCCGUC | 12106 | CCTGGCCAGCAGCATGCCGTC |
| 6442 | CCUGGCCUGGGAUCCCAUCCC | 12107 | CCTGGCCTGGGATCCCATCCC |
| 6443 | CCUGGCUGUCUAGCAAGGCUU | 12108 | CCTGGCTGTCTAGCAAGGCTT |
| 6444 | CCUGGCUUAAGGAAGGUACAA | 12109 | CCTGGCTTAAGGAAGGTACAA |
| 6445 | CCUGGCUUCCCGCGAUUGCAC | 12110 | CCTGGCTTCCCGCGATTGCAC |
| 6446 | CCUGGGACUCAUCAGAGCCAU | 12111 | CCTGGGACTCATCAGAGCCAT |
| 6447 | CCUGGGAGCACGUCUUGGGGG | 12112 | CCTGGGAGCACGTCTTGGGGG |
| 6448 | CCUGGGAUCCCAUCCCAACAC | 12113 | CCTGGGATCCCATCCCAACAC |
| 6449 | CCUGGGCUCAGGCGAUCCUCC | 12114 | CCTGGGCTCAGGCGATCCTCC |
| 6450 | CCUGGGGACAAUUGCCAAUCC | 12115 | CCTGGGGACAATTGCCAATCC |
| 6451 | CCUGGGUGCAGGCCACGUGUC | 12116 | CCTGGGTGCAGGCCACGTGTC |
| 6452 | CCUGGGUGGCCACUGCAGCCU | 12117 | CCTGGGTGGCCACTGCAGCCT |
| 6453 | CCUGGUCCCCCCGGGCCUGUU | 12118 | CCTGGTCCCCCCGGGCCTGTT |
| 6454 | CCUGGUCUCCAACUCCUGAAC | 12119 | CCTGGTCTCCAACTCCTGAAC |
| 6455 | CCUGGUUGUGGCAAAUGUGGA | 12120 | CCTGGTTGTGGCAAATGTGGA |
| 6456 | CCUGUGAGGCGGUUGGCACUG | 12121 | CCTGTGAGGCGGTTGGCACTG |
| 6457 | CCUGUGUCUGGCCAAAUUCAU | 12122 | CCTGTGTCTGGCCAAATTCAT |
| 6458 | CCUGUUCUGCCUCCCAGAUGA | 12123 | CCTGTTCTGCCTCCCAGATGA |
| 6459 | CCUGUUUCUCUUAUCCUUCAC | 12124 | CCTGTTTCTCTTATCCTTCAC |
| 6460 | CCUUACGGCUGUGGAGCUGAC | 12125 | CCTTACGGCTGTGGAGCTGAC |
| 6461 | CCUUCACGAGGAAAGGAAGAA | 12126 | CCTTCACGAGGAAAGGAAGAA |
| 6462 | CCUUCCUCACACUGGCACUUG | 12127 | CCTTCCTCACACTGGCACTTG |
| 6463 | CCUUCGUGUGGGGGUCCAGCU | 12128 | CCTTCGTGTGGGGGTCCAGCT |
| 6464 | CCUUCUAUACAGUGGUUUAAA | 12129 | CCTTCTATACAGTGGTTTAAA |
| 6465 | CCUUGAGGGUGGCCGGGGGCC | 12130 | CCTTGAGGGTGGCCGGGGGCC |
| 6466 | CCUUGCAGGCCUUCGUGUGGG | 12131 | CCTTGCAGGCCTTCGTGTGGG |
| 6467 | CCUUGCAGUCAUAUUCCCGGU | 12132 | CCTTGCAGTCATATTCCCGGT |
| 6468 | CCUUGCAGUCGGGGCCACCAU | 12133 | CCTTGCAGTCGGGGCCACCAT |
| 6469 | CCUUGCUCGUCUGAGCCGUUG | 12134 | CCTTGCTCGTCTGAGCCGTTG |
| 6470 | CCUUGGAACACGUAAAGACCC | 12135 | CCTTGGAACACGTAAAGACCC |
| 6471 | CCUUGGCUUGGAGCCGUUCUC | 12136 | CCTTGGCTTGGAGCCGTTCTC |
| 6472 | CCUUGGUAUCCGCAACAGAGA | 12137 | CCTTGGTATCCGCAACAGAGA |
| 6473 | CCUUGUGACAUCUUCACGCGG | 12138 | CCTTGTGACATCTTCACGCGG |
| 6474 | CCUUUAGCCUGACGGUGGAUG | 12139 | CCTTTAGCCTGACGGTGGATG |
| 6475 | CCUUUCAUCUUCCAUGUUUGA | 12140 | CCTTTCATCTTCCATGTTTGA |
| 6476 | CCUUUCCUGGCUUAAGGAAGG | 12141 | CCTTTCCTGGCTTAAGGAAGG |
| 6477 | CCUUUCUUGAUCUUGGCGGGA | 12142 | CCTTTCTTGATCTTGGCGGGA |
| 6478 | CCUUUGUGACAGGAACCGCGG | 12143 | CCTTTGTGACAGGAACCGCGG |
| 6479 | CGAAACCAGAAAGGCUUAUCA | 12144 | CGAAACCAGAAAGGCTTATCA |
| 6480 | CGAAACUCGUCCUGGGAGCAC | 12145 | CGAAACTCGTCCTGGGAGCAC |
| 6481 | CGAAAGACACUGGGUGGGUCA | 12146 | CGAAAGACACTGGGTGGGTCA |
| 6482 | CGAACUGCCGAGAGAUGCACU | 12147 | CGAACTGCCGAGAGATGCACT |
| 6483 | CGAAGCCUGUUCUGCCUCCCA | 12148 | CGAAGCCTGTTCTGCCTCCCA |
| 6484 | CGAAGGCCGAGCAGGGGCUAC | 12149 | CGAAGGCCGAGCAGGGGCTAC |
| 6485 | CGACAAGAUUGGGGAAGUGAA | 12150 | CGACAAGATTGGGGAAGTGAA |
| 6486 | CGACAAUGGCAGUUCUCGAUA | 12151 | CGACAATGGCAGTTCTCGATA |
| 6487 | CGACAGAAAACAGUGCAAAAU | 12152 | CGACAGAAAACAGTGCAAAAT |
| 6488 | CGACAGCCUCAAAUGCCUGAG | 12153 | CGACAGCCTCAAATGCCTGAG |
| 6489 | CGACAGGUGGCCACAGCGCAG | 12154 | CGACAGGTGGCCACAGCGCAG |
| 6490 | CGACAGGUGGCCACAGGACAG | 12155 | CGACAGGTGGCCACAGGACAG |
| 6491 | CGACCACGUUCCUCAGGUUGG | 12156 | CGACCACGTTCCTCAGGTTGG |
| 6492 | CGACCCGGAUCACGACCUGCU | 12157 | CGACCCGGATCACGACCTGCT |
| 6493 | CGACCUGCUGUGUCCUAGCUG | 12158 | CGACCTGCTGTGTCCTAGCTG |
| 6494 | CGACGCCAUGAAUCCCUUUCC | 12159 | CGACGCCATGAATCCCTTTCC |
| 6495 | CGACGGUCCAGCGCAAUUUCC | 12160 | CGACGGTCCAGCGCAATTTCC |
| 6496 | CGACUCGUGUAUGUCGCGGAG | 12161 | CGACTCGTGTATGTCGCGGAG |
| 6497 | CGAGAAUAGUCACUGAACAAA | 12162 | CGAGAATAGTCACTGAACAAA |
| 6498 | CGAGACCAGAGACCCAGCUCC | 12163 | CGAGACCAGAGACCCAGCTCC |
| 6499 | CGAGAGAUGCACUUCCCAUCG | 12164 | CGAGAGATGCACTTCCCATCG |
| 6500 | CGAGCAGGGGCUACUGUCCCC | 12165 | CGAGCAGGGGCTACTGTCCCC |
| 6501 | CGAGCCAUCUUCGCAGUCGGG | 12166 | CGAGCCATCTTCGCAGTCGGG |
| 6502 | CGAGGAAAGGAAGAAACCAAA | 12167 | CGAGGAAAGGAAGAAACCAAA |
| 6503 | CGAGGAGCAAGGCGACGGUCC | 12168 | CGAGGAGCAAGGCGACGGTCC |
| 6504 | CGAGGAGCACGAUGGGGAGGA | 12169 | CGAGGAGCACGATGGGGAGGA |
| 6505 | CGAGGAGCACUGUAGGGAGAG | 12170 | CGAGGAGCACTGTAGGGAGAG |
| 6506 | CGAGGCCUUGAGGGUGGCCGG | 12171 | CGAGGCCTTGAGGGTGGCCGG |
| 6507 | CGAGGGCGCCCCCCAGGACAA | 12172 | CGAGGGCGCCCCCCAGGACAA |
| 6508 | CGAGGGGUAGCUGUAGCCGUC | 12173 | CGAGGGGTAGCTGTAGCCGTC |
| 6509 | CGAGGUCUCAGGAAGGGUUCU | 12174 | CGAGGTCTCAGGAAGGGTTCT |
| 6510 | CGAGUAGAUGUCCACACCAUU | 12175 | CGAGTAGATGTCCACACCATT |
| 6511 | CGAGUAGCUGGGACUACAGGU | 12176 | CGAGTAGCTGGGACTACAGGT |
| 6512 | CGAGUGGGGGUUGAUCUGCGG | 12177 | CGAGTGGGGGTTGATCTGCGG |
| 6513 | CGAUAUCGCACUCUUUGAUGG | 12178 | CGATATCGCACTCTTTGATGG |
| 6514 | CGAUAUCUUCGCAUCUUCGCU | 12179 | CGATATCTTCGCATCTTCGCT |
| 6515 | CGAUAUUCACGAUCACGGCUU | 12180 | CGATATTCACGATCACGGCTT |
| 6516 | CGAUCACGGCUUUGAAGUCCC | 12181 | CGATCACGGCTTTGAAGTCCC |
| 6517 | CGAUCAUGGCUCACUGCAACC | 12182 | CGATCATGGCTCACTGCAACC |
| 6518 | CGAUCCAGACUGGAGGAUUUA | 12183 | CGATCCAGACTGGAGGATTTA |
| 6519 | CGAUCCUCCUGCCUCAGCCUC | 12184 | CGATCCTCCTGCCTCAGCCTC |
| 6520 | CGAUCUCCUGACCUCAUGAUC | 12185 | CGATCTCCTGACCTCATGATC |
| 6521 | CGAUCUUAAGGUCAUUGCAGA | 12186 | CGATCTTAAGGTCATTGCAGA |
| 6522 | CGAUGCUUGAGAUGGAGUGAA | 12187 | CGATGCTTGAGATGGAGTGAA |
| 6523 | CGAUGGAGCCCACAGCCUUGC | 12188 | CGATGGAGCCCACAGCCTTGC |
| 6524 | CGAUGGCCCUUGGCUUGGAGC | 12189 | CGATGGCCCTTGGCTTGGAGC |
| 6525 | CGAUGGGGAGGACAAUGGACA | 12190 | CGATGGGGAGGACAATGGACA |
| 6526 | CGAUUUCAGAAAGAACCUGAA | 12191 | CGATTTCAGAAAGAACCTGAA |
| 6527 | CGCAACAGAGACAGUGCCCAG | 12192 | CGCAACAGAGACAGTGCCCAG |
| 6528 | CGCAAUCUCGGCUCACUGCAA | 12193 | CGCAATCTCGGCTCACTGCAA |
| 6529 | CGCAAUUUCCAGCCCCAGGGC | 12194 | CGCAATTTCCAGCCCCAGGGC |
| 6530 | CGCACCUCCAGAACUGAGGAA | 12195 | CGCACCTCCAGAACTGAGGAA |
| 6531 | CGCACUCUUUGAUGGGUUCAU | 12196 | CGCACTCTTTGATGGGTTCAT |
| 6532 | CGCAGACCCACUUGUAGGAGA | 12197 | CGCAGACCCACTTGTAGGAGA |
| 6533 | CGCAGAGCUGGCUGCAGGUGU | 12198 | CGCAGAGCTGGCTGCAGGTGT |
| 6534 | CGCAGAGUGUCACAUUAACGC | 12199 | CGCAGAGTGTCACATTAACGC |
| 6535 | CGCAGAGUGUCAGACAGCCUU | 12200 | CGCAGAGTGTCAGACAGCCTT |
| 6536 | CGCAGCCAACUUCAUCGCUCA | 12201 | CGCAGCCAACTTCATCGCTCA |
| 6537 | CGCAGCCUCUGCCAGGCAGUG | 12202 | CGCAGCCTCTGCCAGGCAGTG |
| 6538 | CGCAGGCCCACAGCUGGGGGA | 12203 | CGCAGGCCCACAGCTGGGGGA |
| 6539 | CGCAGGUAAACUUGGGCGAGU | 12204 | CGCAGGTAAACTTGGGCGAGT |
| 6540 | CGCAGUCCACUUGGCCAUCGC | 12205 | CGCAGTCCACTTGGCCATCGC |
| 6541 | CGCAGUCGGGGUCGUUGUCGC | 12206 | CGCAGTCGGGGTCGTTGTCGC |
| 6542 | CGCAGUUUUCCUCGUCAGAUU | 12207 | CGCAGTTTTCCTCGTCAGATT |
| 6543 | CGCAUCUGUCGCCCACGUGGC | 12208 | CGCATCTGTCGCCCACGTGGC |
| 6544 | CGCAUCUGUCGCCCACUGCAG | 12209 | CGCATCTGTCGCCCACTGCAG |
| 6545 | CGCAUCUUCGCUGGGCCACCA | 12210 | CGCATCTTCGCTGGGCCACCA |
| 6546 | CGCAUUUACGUGCUCCGAAAC | 12211 | CGCATTTACGTGCTCCGAAAC |
| 6547 | CGCCACAGAGCACAGCGGAAA | 12212 | CGCCACAGAGCACAGCGGAAA |
| 6548 | CGCCACCACGCCCGGCUAAUU | 12213 | CGCCACCACGCCCGGCTAATT |
| 6549 | CGCCACGUCAUCCUCCAGACU | 12214 | CGCCACGTCATCCTCCAGACT |
| 6550 | CGCCACUUAGGCAGUGGAACU | 12215 | CGCCACTTAGGCAGTGGAACT |
| 6551 | CGCCAGCUGGAGUGGAUGCAC | 12216 | CGCCAGCTGGAGTGGATGCAC |
| 6552 | CGCCAGGAGGGCCCAGGAUAA | 12217 | CGCCAGGAGGGCCCAGGATAA |
| 6553 | CGCCAGUUCUUCCAUAGAAGG | 12218 | CGCCAGTTCTTCCATAGAAGG |
| 6554 | CGCCAUGAAUCCCUUUCCUGG | 12219 | CGCCATGAATCCCTTTCCTGG |
| 6555 | CGCCAUGCCUGGCCAGAGGCC | 12220 | CGCCATGCCTGGCCAGAGGCC |
| 6556 | CGCCAUUGCUCAGGGUGGUCC | 12221 | CGCCATTGCTCAGGGTGGTCC |
| 6557 | CGCCCACGUGGCUGAAGAUCU | 12222 | CGCCCACGTGGCTGAAGATCT |
| 6558 | CGCCCACUGCAGUCCCCGCCG | 12223 | CGCCCACTGCAGTCCCCGCCG |
| 6559 | CGCCCAGAGCUUGGUGAGACA | 12224 | CGCCCAGAGCTTGGTGAGACA |
| 6560 | CGCCCAGGCCAGACUGCGGAC | 12225 | CGCCCAGGCCAGACTGCGGAC |
| 6561 | CGCCCCCCAGGACAAGGUGGG | 12226 | CGCCCCCCAGGACAAGGTGGG |
| 6562 | CGCCCGGCCUCACCGUGCAUG | 12227 | CGCCCGGCCTCACCGTGCATG |
| 6563 | CGCCCGGCUAAUUUUUUGUAU | 12228 | CGCCCGGCTAATTTTTTGTAT |
| 6564 | CGCCCUUGGUAUCCGCAACAG | 12229 | CGCCCTTGGTATCCGCAACAG |
| 6565 | CGCCGCGGCGAGGAGCAAGGC | 12230 | CGCCGCGGCGAGGAGCAAGGC |
| 6566 | CGCCGCUGUGACACUUGAACU | 12231 | CGCCGCTGTGACACTTGAACT |
| 6567 | CGCCGUGGGCUCUGUCAAGCU | 12232 | CGCCGTGGGCTCTGTCAAGCT |
| 6568 | CGCCGUUGUUGUCCAAGCAUU | 12233 | CGCCGTTGTTGTCCAAGCATT |
| 6569 | CGCCUCGGCCUCCCAAAGUGC | 12234 | CGCCTCGGCCTCCCAAAGTGC |
| 6570 | CGCCUUUGUGACAGGAACCGC | 12235 | CGCCTTTGTGACAGGAACCGC |
| 6571 | CGCGGAGGAACGCCAGGCCUC | 12236 | CGCGGAGGAACGCCAGGCCTC |
| 6572 | CGCGGAGGCGGCUCCGGGGAC | 12237 | CGCGGAGGCGGCTCCGGGGAC |
| 6573 | CGCGGCGAGGAGCAAGGCGAC | 12238 | CGCGGCGAGGAGCAAGGCGAC |
| 6574 | CGCGGGAGUCUGACGGAGGCU | 12239 | CGCGGGAGTCTGACGGAGGCT |
| 6575 | CGCUACUGGGCUUCUUCUCAU | 12240 | CGCTACTGGGCTTCTTCTCAT |
| 6576 | CGCUCAUGUCCUUGCAGUCAU | 12241 | CGCTCATGTCCTTGCAGTCAT |
| 6577 | CGCUCCGGUCCAGCGUCAUCU | 12242 | CGCTCCGGTCCAGCGTCATCT |
| 6578 | CGCUCUGUCACACAGCUGCCC | 12243 | CGCTCTGTCACACAGCTGCCC |
| 6579 | CGCUCUGUCGCCCAGGCCAGA | 12244 | CGCTCTGTCGCCCAGGCCAGA |
| 6580 | CGCUGCCAUCGCAGACCCACU | 12245 | CGCTGCCATCGCAGACCCACT |
| 6581 | CGCUGCGGCCACUCAUCCGAG | 12246 | CGCTGCGGCCACTCATCCGAG |
| 6582 | CGCUGGGCCACCAGCUGGAAG | 12247 | CGCTGGGCCACCAGCTGGAAG |
| 6583 | CGCUGUGACACUUGAACUUGU | 12248 | CGCTGTGACACTTGAACTTGT |
| 6584 | CGCUUCCCGGGUUCACACCAU | 12249 | CGCTTCCCGGGTTCACACCAT |
| 6585 | CGCUUUGUUGCUCAGGCCUGG | 12250 | CGCTTTGTTGCTCAGGCCTGG |
| 6586 | CGGAAACCGGGGACUUCGCCA | 12251 | CGGAAACCGGGGACTTCGCCA |
| 6587 | CGGAACCUGUGAGGCGGUUGG | 12252 | CGGAACCTGTGAGGCGGTTGG |
| 6588 | CGGACAUAAAGACGACAAUGG | 12253 | CGGACATAAAGACGACAATGG |
| 6589 | CGGACAUCAGUGCAACAGUAA | 12254 | CGGACATCAGTGCAACAGTAA |
| 6590 | CGGACUGCAGUGGCGCAAUCU | 12255 | CGGACTGCAGTGGCGCAATCT |
| 6591 | CGGAGGAACGCCAGGCCUCCC | 12256 | CGGAGGAACGCCAGGCCTCCC |
| 6592 | CGGAGGCGGCUCCGGGGACCC | 12257 | CGGAGGCGGCTCCGGGGACCC |
| 6593 | CGGAGGCUGUCACUGUCUCUC | 12258 | CGGAGGCTGTCACTGTCTCTC |
| 6594 | CGGAGGGCGACUCGUGUAUGU | 12259 | CGGAGGGCGACTCGTGTATGT |
| 6595 | CGGAGGUGUCGCCACAGAGCA | 12260 | CGGAGGTGTCGCCACAGAGCA |
| 6596 | CGGAGUCUCGCUCUGUCGCCC | 12261 | CGGAGTCTCGCTCTGTCGCCC |
| 6597 | CGGAUCACGACCUGCUGUGUC | 12262 | CGGATCACGACCTGCTGTGTC |
| 6598 | CGGAUUCAGCCAGAUCAUUUC | 12263 | CGGATTCAGCCAGATCATTTC |
| 6599 | CGGAUUUGCAGGUGACAGACA | 12264 | CGGATTTGCAGGTGACAGACA |
| 6600 | CGGCAGUCUCUAGCCAUGUUG | 12265 | CGGCAGTCTCTAGCCATGTTG |
| 6601 | CGGCAUUCAUUGACACGGGCU | 12266 | CGGCATTCATTGACACGGGCT |
| 6602 | CGGCCAAGGAGAAGGGGUGGG | 12267 | CGGCCAAGGAGAAGGGGTGGG |
| 6603 | CGGCCAAGGUAACCGGGUGUC | 12268 | CGGCCAAGGTAACCGGGTGTC |
| 6604 | CGGCCACUCAUCCGAGCCAUC | 12269 | CGGCCACTCATCCGAGCCATC |
| 6605 | CGGCCACUGAGGAGAUCUAGG | 12270 | CGGCCACTGAGGAGATCTAGG |
| 6606 | CGGCCCCCACAGCUGAAGUCC | 12271 | CGGCCCCCACAGCTGAAGTCC |
| 6607 | CGGCCUCACCGUGCAUGUUUU | 12272 | CGGCCTCACCGTGCATGTTTT |
| 6608 | CGGCCUCCCAAAGUGCUGGGA | 12273 | CGGCCTCCCAAAGTGCTGGGA |
| 6609 | CGGCGAGGAGCAAGGCGACGG | 12274 | CGGCGAGGAGCAAGGCGACGG |
| 6610 | CGGCGAGGUCUCAGGAAGGGU | 12275 | CGGCGAGGTCTCAGGAAGGGT |
| 6611 | CGGCGAUUUCAGAAAGAACCU | 12276 | CGGCGATTTCAGAAAGAACCT |
| 6612 | CGGCUAAUUUUUUGUAUUUUU | 12277 | CGGCTAATTTTTTGTATTTTT |
| 6613 | CGGCUCACUGCAAGCUCCGCU | 12278 | CGGCTCACTGCAAGCTCCGCT |
| 6614 | CGGCUCCGGGGACCCGGGACU | 12279 | CGGCTCCGGGGACCCGGGACT |
| 6615 | CGGCUGCAGACCAAGGAGGGG | 12280 | CGGCTGCAGACCAAGGAGGGG |
| 6616 | CGGCUGCCAUGGAUGCAGUUU | 12281 | CGGCTGCCATGGATGCAGTTT |
| 6617 | CGGCUGUGGAGCUGACCUUUA | 12282 | CGGCTGTGGAGCTGACCTTTA |
| 6618 | CGGCUUUGAAGUCCCGGUCAA | 12283 | CGGCTTTGAAGTCCCGGTCAA |
| 6619 | CGGGAACAGGUCGGGUGGUUG | 12284 | CGGGAACAGGTCGGGTGGTTG |
| 6620 | CGGGAAUGGAAGUGGGUAGGG | 12285 | CGGGAATGGAAGTGGGTAGGG |
| 6621 | CGGGACCACAGGUGAGCACCG | 12286 | CGGGACCACAGGTGAGCACCG |
| 6622 | CGGGACUCCAGGCAGAUGUUC | 12287 | CGGGACTCCAGGCAGATGTTC |
| 6623 | CGGGACUUGUCGUCGCCUUUG | 12288 | CGGGACTTGTCGTCGCCTTTG |
| 6624 | CGGGAGGAUGGGCACCAGGCU | 12289 | CGGGAGGATGGGCACCAGGCT |
| 6625 | CGGGAGGUGUCGGGAACAGGU | 12290 | CGGGAGGTGTCGGGAACAGGT |
| 6626 | CGGGAGUCUGACGGAGGCUGU | 12291 | CGGGAGTCTGACGGAGGCTGT |
| 6627 | CGGGAGUUCCCCAGUCAGUCC | 12292 | CGGGAGTTCCCCAGTCAGTCC |
| 6628 | CGGGAUCCUGACACUCAUCGA | 12293 | CGGGATCCTGACACTCATCGA |
| 6629 | CGGGCAGGAGGCCUCGUCUGA | 12294 | CGGGCAGGAGGCCTCGTCTGA |
| 6630 | CGGGCAGGCGCAGGUAAACUU | 12295 | CGGGCAGGCGCAGGTAAACTT |
| 6631 | CGGGCCUGUUUCUCUUAUCCU | 12296 | CGGGCCTGTTTCTCTTATCCT |
| 6632 | CGGGCUUUCCCUGGCCUGGGA | 12297 | CGGGCTTTCCCTGGCCTGGGA |
| 6633 | CGGGGACAUCAUUCUCCCAAA | 12298 | CGGGGACATCATTCTCCCAAA |
| 6634 | CGGGGACCCGGGACUUGUCGU | 12299 | CGGGGACCCGGGACTTGTCGT |
| 6635 | CGGGGACUUCGCCAGGAGGGC | 12300 | CGGGGACTTCGCCAGGAGGGC |
| 6636 | CGGGGAGAUUCUGAGGCAACG | 12301 | CGGGGAGATTCTGAGGCAACG |
| 6637 | CGGGGCACAGGCACUCGUAGC | 12302 | CGGGGCACAGGCACTCGTAGC |
| 6638 | CGGGGCAGGGAGGCACAGAUA | 12303 | CGGGGCAGGGAGGCACAGATA |
| 6639 | CGGGGCCACCAUCACAGCGCC | 12304 | CGGGGCCACCATCACAGCGCC |
| 6640 | CGGGGCUGGUGGGGCGAGGGC | 12305 | CGGGGCTGGTGGGGCGAGGGC |
| 6641 | CGGGGGCCCCUCUGUGAACUU | 12306 | CGGGGGCCCCTCTGTGAACTT |
| 6642 | CGGGGGCCUGGAUGUCUCUGC | 12307 | CGGGGGCCTGGATGTCTCTGC |
| 6643 | CGGGGGUGACAGGGCAAAGGC | 12308 | CGGGGGTGACAGGGCAAAGGC |
| 6644 | CGGGGUCGUUGUCGCAGGCCC | 12309 | CGGGGTCGTTGTCGCAGGCCC |
| 6645 | CGGGGUUGUCAAAGUUGAUGC | 12310 | CGGGGTTGTCAAAGTTGATGC |
| 6646 | CGGGGUUUCACGUGUUAGCCA | 12311 | CGGGGTTTCACGTGTTAGCCA |
| 6647 | CGGGUGGUUGUGUGCUGUGUC | 12312 | CGGGTGGTTGTGTGCTGTGTC |
| 6648 | CGGGUGUCUCAGGCACUUAAU | 12313 | CGGGTGTCTCAGGCACTTAAT |
| 6649 | CGGGUUCACACCAUUCUCCUG | 12314 | CGGGTTCACACCATTCTCCTG |
| 6650 | CGGUCAACCUGCCCCUCUCUG | 12315 | CGGTCAACCTGCCCCTCTCTG |
| 6651 | CGGUCACACUGCCGGCUGCCA | 12316 | CGGTCACACTGCCGGCTGCCA |
| 6652 | CGGUCCAGCGCAAUUUCCAGC | 12317 | CGGTCCAGCGCAATTTCCAGC |
| 6653 | CGGUCCAGCGUCAUCUUCCUG | 12318 | CGGTCCAGCGTCATCTTCCTG |
| 6654 | CGGUCCAGUAGAUGUUGCUGU | 12319 | CGGTCCAGTAGATGTTGCTGT |
| 6655 | CGGUCUGAGUCACAGACGAAC | 12320 | CGGTCTGAGTCACAGACGAAC |
| 6656 | CGGUGCCACCACGGAUUCAGC | 12321 | CGGTGCCACCACGGATTCAGC |
| 6657 | CGGUGGAGAGAAACUCAAAAC | 12322 | CGGTGGAGAGAAACTCAAAAC |
| 6658 | CGGUGGAUGUCUCCUGGGUGG | 12323 | CGGTGGATGTCTCCTGGGTGG |
| 6659 | CGGUGUCAUAGGAAGAGACGC | 12324 | CGGTGTCATAGGAAGAGACGC |
| 6660 | CGGUUCCCUGCACUGGGGGGG | 12325 | CGGTTCCCTGCACTGGGGGGG |
| 6661 | CGGUUGACACGGCCCCCACAG | 12326 | CGGTTGACACGGCCCCCACAG |
| 6662 | CGGUUGCCCCCGUUGACAUCG | 12327 | CGGTTGCCCCCGTTGACATCG |
| 6663 | CGGUUGGCACUGAAAAUGGCU | 12328 | CGGTTGGCACTGAAAATGGCT |
| 6664 | CGGUUGGUGAAGAAGAGGUAG | 12329 | CGGTTGGTGAAGAAGAGGTAG |
| 6665 | CGUAAAGACCCCUACAGCGCU | 12330 | CGTAAAGACCCCTACAGCGCT |
| 6666 | CGUAAGGAACCGAGGCCUUGA | 12331 | CGTAAGGAACCGAGGCCTTGA |
| 6667 | CGUACCCAGCUGAUUUUUAAC | 12332 | CGTACCCAGCTGATTTTTAAC |
| 6668 | CGUAGCCGAUCUUAAGGUCAU | 12333 | CGTAGCCGATCTTAAGGTCAT |
| 6669 | CGUCAAACGAUCCAGACUGGA | 12334 | CGTCAAACGATCCAGACTGGA |
| 6670 | CGUCAGAUUUGUCCUUGCAGU | 12335 | CGTCAGATTTGTCCTTGCAGT |
| 6671 | CGUCAGGGCGACAGGUGGCCA | 12336 | CGTCAGGGCGACAGGTGGCCA |
| 6672 | CGUCAUCCUCCAGACUGACCA | 12337 | CGTCATCCTCCAGACTGACCA |
| 6673 | CGUCAUCUUCCUGACCUCGUG | 12338 | CGTCATCTTCCTGACCTCGTG |
| 6674 | CGUCCAAGCAGUCCCGGUCUG | 12339 | CGTCCAAGCAGTCCCGGTCTG |
| 6675 | CGUCCGGGCAGGCGCAGGUAA | 12340 | CGTCCGGGCAGGCGCAGGTAA |
| 6676 | CGUCCUGGGAGCACGUCUUGG | 12341 | CGTCCTGGGAGCACGTCTTGG |
| 6677 | CGUCCUGGUUGUGGCAAAUGU | 12342 | CGTCCTGGTTGTGGCAAATGT |
| 6678 | CGUCGCCCAGAGCUUGGUGAG | 12343 | CGTCGCCCAGAGCTTGGTGAG |
| 6679 | CGUCGCCUUUGUGACAGGAAC | 12344 | CGTCGCCTTTGTGACAGGAAC |
| 6680 | CGUCGGGGCACAGGCACUCGU | 12345 | CGTCGGGGCACAGGCACTCGT |
| 6681 | CGUCGGGGGCCUGGAUGUCUC | 12346 | CGTCGGGGGCCTGGATGTCTC |
| 6682 | CGUCUCCUGGGACUCAUCAGA | 12347 | CGTCTCCTGGGACTCATCAGA |
| 6683 | CGUCUGAGCCGUCCAAGCAGU | 12348 | CGTCTGAGCCGTCCAAGCAGT |
| 6684 | CGUCUGAGCCGUUGUCGCAGU | 12349 | CGTCTGAGCCGTTGTCGCAGT |
| 6685 | CGUCUUGGCACUGGAACUCGU | 12350 | CGTCTTGGCACTGGAACTCGT |
| 6686 | CGUCUUGGGGGAGCACGUCUC | 12351 | CGTCTTGGGGGAGCACGTCTC |
| 6687 | CGUCUUGGGGGGACAGCCUUG | 12352 | CGTCTTGGGGGGACAGCCTTG |
| 6688 | CGUGAGCCACUGCGCCCGGCC | 12353 | CGTGAGCCACTGCGCCCGGCC |
| 6689 | CGUGAGGCACCUGUGUCUGGC | 12354 | CGTGAGGCACCTGTGTCTGGC |
| 6690 | CGUGCAAAUAAUCUUUGUACA | 12355 | CGTGCAAATAATCTTTGTACA |
| 6691 | CGUGCAUGUUUUAAACACAUA | 12356 | CGTGCATGTTTTAAACACATA |
| 6692 | CGUGCCACCGUACCCAGCUGA | 12357 | CGTGCCACCGTACCCAGCTGA |
| 6693 | CGUGCCGGUUGGUGAAGAAGA | 12358 | CGTGCCGGTTGGTGAAGAAGA |
| 6694 | CGUGCUCCGAAACCAGAAAGG | 12359 | CGTGCTCCGAAACCAGAAAGG |
| 6695 | CGUGGCAGCGAAACUCGUCCU | 12360 | CGTGGCAGCGAAACTCGTCCT |
| 6696 | CGUGGCGAUGGGGAGGACAAU | 12361 | CGTGGCGATGGGGAGGACAAT |
| 6697 | CGUGGCUGAAGAUCUCGGCUG | 12362 | CGTGGCTGAAGATCTCGGCTG |
| 6698 | CGUGGGAACAGCCGCCGUUGU | 12363 | CGTGGGAACAGCCGCCGTTGT |
| 6699 | CGUGGGCUCUGUCAAGCUGGG | 12364 | CGTGGGCTCTGTCAAGCTGGG |
| 6700 | CGUGGUGAGCCCAGGGGUGGC | 12365 | CGTGGTGAGCCCAGGGGTGGC |
| 6701 | CGUGUAUGUCGCGGAGGCGGC | 12366 | CGTGTATGTCGCGGAGGCGGC |
| 6702 | CGUGUCCAGAGCGACCACGUU | 12367 | CGTGTCCAGAGCGACCACGTT |
| 6703 | CGUGUCCUCACGGCCAAGGUA | 12368 | CGTGTCCTCACGGCCAAGGTA |
| 6704 | CGUGUGGGGGUCCAGCUGGAA | 12369 | CGTGTGGGGGTCCAGCTGGAA |
| 6705 | CGUGUUAGCCAGGAUGGUCUC | 12370 | CGTGTTAGCCAGGATGGTCTC |
| 6706 | CGUUCCUCAGGUUGGGGAUGA | 12371 | CGTTCCTCAGGTTGGGGATGA |
| 6707 | CGUUCUCCCUGAAUAACGUUU | 12372 | CGTTCTCCCTGAATAACGTTT |
| 6708 | CGUUGACAUCGAUGCUUGAGA | 12373 | CGTTGACATCGATGCTTGAGA |
| 6709 | CGUUGACUCCUGAGUUUAGGG | 12374 | CGTTGACTCCTGAGTTTAGGG |
| 6710 | CGUUGAUGAUAUCUGUCCAAA | 12375 | CGTTGATGATATCTGTCCAAA |
| 6711 | CGUUGCACACAGUCCAGUUCG | 12376 | CGTTGCACACAGTCCAGTTCG |
| 6712 | CGUUGGUCCCGCACUCUUUGA | 12377 | CGTTGGTCCCGCACTCTTTGA |
| 6713 | CGUUGGUGCCAUCUGCUGUUG | 12378 | CGTTGGTGCCATCTGCTGTTG |
| 6714 | CGUUGUCGCAGGCCCACAGCU | 12379 | CGTTGTCGCAGGCCCACAGCT |
| 6715 | CGUUGUCGCAGUCCACUUGGC | 12380 | CGTTGTCGCAGTCCACTTGGC |
| 6716 | CGUUGUUGUCCAAGCAUUCGU | 12381 | CGTTGTTGTCCAAGCATTCGT |
| 6717 | CGUUUCAACCUCGUAAGGAAC | 12382 | CGTTTCAACCTCGTAAGGAAC |
| 6718 | CGUUUCUUUCGCAUCUGUCGC | 12383 | CGTTTCTTTCGCATCTGTCGC |
| 6719 | CGUUUUCCUCUUCACGCCCUU | 12384 | CGTTTTCCTCTTCACGCCCTT |
| 6720 | CUAACCUGGCUGUCUAGCAAG | 12385 | CTAACCTGGCTGTCTAGCAAG |
| 6721 | CUAAUUUUUUGUAUUUUUAGU | 12386 | CTAATTTTTTGTATTTTTAGT |
| 6722 | CUACAAAAACCUUCUAUACAG | 12387 | CTACAAAAACCTTCTATACAG |
| 6723 | CUACACAGGGCCCCGAGAAUA | 12388 | CTACACAGGGCCCCGAGAATA |
| 6724 | CUACAGCGCUGCGGCCACUCA | 12389 | CTACAGCGCTGCGGCCACTCA |
| 6725 | CUACAGGUGCCCGCCACCACG | 12390 | CTACAGGTGCCCGCCACCACG |
| 6726 | CUACUGGGCUUCUUCUCAUUU | 12391 | CTACTGGGCTTCTTCTCATTT |
| 6727 | CUACUGUCCCCUUGGAACACG | 12392 | CTACTGTCCCCTTGGAACACG |
| 6728 | CUAGCAAGGCUUGCAUAGAAG | 12393 | CTAGCAAGGCTTGCATAGAAG |
| 6729 | CUAGCCAUGUUGCAGACUUUG | 12394 | CTAGCCATGTTGCAGACTTTG |
| 6730 | CUAGCUGGAAACCCUGGCUUC | 12395 | CTAGCTGGAAACCCTGGCTTC |
| 6731 | CUAGGGUGAUGCCAUUGGGCC | 12396 | CTAGGGTGATGCCATTGGGCC |
| 6732 | CUAGGUGGGCGGACAUAAAGA | 12397 | CTAGGTGGGCGGACATAAAGA |
| 6733 | CUAUACAGUGGUUUAAAAAGU | 12398 | CTATACAGTGGTTTAAAAAGT |
| 6734 | CUAUCUCCACCGUGGUGAGCC | 12399 | CTATCTCCACCGTGGTGAGCC |
| 6735 | CUAUCUGUACAGGGACGCAUU | 12400 | CTATCTGTACAGGGACGCATT |
| 6736 | CUAUGUUGCCCAGGCUGGAAA | 12401 | CTATGTTGCCCAGGCTGGAAA |
| 6737 | CUAUUGCUGGCCACCUCCGUG | 12402 | CTATTGCTGGCCACCTCCGTG |
| 6738 | CUCAAAACUUCCUGGAGAGAA | 12403 | CTCAAAACTTCCTGGAGAGAA |
| 6739 | CUCAAACCAUCCUCCCACCUC | 12404 | CTCAAACCATCCTCCCACCTC |
| 6740 | CUCAAAGACGGCCAAGGAGAA | 12405 | CTCAAAGACGGCCAAGGAGAA |
| 6741 | CUCAAAUGCCUGAGCUCAAAC | 12406 | CTCAAATGCCTGAGCTCAAAC |
| 6742 | CUCAAGUGAUCCAGCUCAGCC | 12407 | CTCAAGTGATCCAGCTCAGCC |
| 6743 | CUCACACCAGUUCACUCCUCU | 12408 | CTCACACCAGTTCACTCCTCT |
| 6744 | CUCACACUGGCACUUGUAGCC | 12409 | CTCACACTGGCACTTGTAGCC |
| 6745 | CUCACCGUGCAUGUUUUAAAC | 12410 | CTCACCGTGCATGTTTTAAAC |
| 6746 | CUCACGACAGCCUCAAAUGCC | 12411 | CTCACGACAGCCTCAAATGCC |
| 6747 | CUCACGCUACUGGGCUUCUUC | 12412 | CTCACGCTACTGGGCTTCTTC |
| 6748 | CUCACGGCCAAGGUAACCGGG | 12413 | CTCACGGCCAAGGTAACCGGG |
| 6749 | CUCACUGCAACCUCCACCUCC | 12414 | CTCACTGCAACCTCCACCTCC |
| 6750 | CUCACUGCAAGCUCCGCUUCC | 12415 | CTCACTGCAAGCTCCGCTTCC |
| 6751 | CUCAGCCUCCCAAAGUGCUGG | 12416 | CTCAGCCTCCCAAAGTGCTGG |
| 6752 | CUCAGCCUCCCAAGUAGCUGG | 12417 | CTCAGCCTCCCAAGTAGCTGG |
| 6753 | CUCAGCCUCCCGAGUAGCUGG | 12418 | CTCAGCCTCCCGAGTAGCTGG |
| 6754 | CUCAGCCUCGCCAUGCCUGGC | 12419 | CTCAGCCTCGCCATGCCTGGC |
| 6755 | CUCAGCCUCUCUUGGCUGGGU | 12420 | CTCAGCCTCTCTTGGCTGGGT |
| 6756 | CUCAGCCUCUGUGAGGCAGCU | 12421 | CTCAGCCTCTGTGAGGCAGCT |
| 6757 | CUCAGCGCUGCCAUCGCAGAC | 12422 | CTCAGCGCTGCCATCGCAGAC |
| 6758 | CUCAGGAAGGGUUCUGGGCAG | 12423 | CTCAGGAAGGGTTCTGGGCAG |
| 6759 | CUCAGGCACUUAAUAAAUAUU | 12424 | CTCAGGCACTTAATAAATATT |
| 6760 | CUCAGGCCUGGUCUCCAACUC | 12425 | CTCAGGCCTGGTCTCCAACTC |
| 6761 | CUCAGGCGAUCCUCCUGCCUC | 12426 | CTCAGGCGATCCTCCTGCCTC |
| 6762 | CUCAGGCUCUGCCUCUGGGAA | 12427 | CTCAGGCTCTGCCTCTGGGAA |
| 6763 | CUCAGGGUGGUCCUCUCACAC | 12428 | CTCAGGGTGGTCCTCTCACAC |
| 6764 | CUCAGGUUGGGGAUGAGGCUG | 12429 | CTCAGGTTGGGGATGAGGCTG |
| 6765 | CUCAUACAUACAACGGGGACA | 12430 | CTCATACATACAACGGGGACA |
| 6766 | CUCAUCAGAGCCAUCCUGGCA | 12431 | CTCATCAGAGCCATCCTGGCA |
| 6767 | CUCAUCCGAGCCAUCUUCGCA | 12432 | CTCATCCGAGCCATCTTCGCA |
| 6768 | CUCAUCCUCUGUGGUCUUCUG | 12433 | CTCATCCTCTGTGGTCTTCTG |
| 6769 | CUCAUCGAUAUCGCACUCUUU | 12434 | CTCATCGATATCGCACTCTTT |
| 6770 | CUCAUCGAUAUCUUCGCAUCU | 12435 | CTCATCGATATCTTCGCATCT |
| 6771 | CUCAUGAUCCACCCGCCUCGG | 12436 | CTCATGATCCACCCGCCTCGG |
| 6772 | CUCAUGUCCCUGGCCAGCAGC | 12437 | CTCATGTCCCTGGCCAGCAGC |
| 6773 | CUCAUGUCCUUGCAGUCAUAU | 12438 | CTCATGTCCTTGCAGTCATAT |
| 6774 | CUCAUUUCCUCUGCCAGCAAC | 12439 | CTCATTTCCTCTGCCAGCAAC |
| 6775 | CUCCAACUCCUGAACUCAAGU | 12440 | CTCCAACTCCTGAACTCAAGT |
| 6776 | CUCCAAGAUGGUCUUCCGGUU | 12441 | CTCCAAGATGGTCTTCCGGTT |
| 6777 | CUCCACCGUGGUGAGCCCAGG | 12442 | CTCCACCGTGGTGAGCCCAGG |
| 6778 | CUCCACCUCCUGGGCUCAGGC | 12443 | CTCCACCTCCTGGGCTCAGGC |
| 6779 | CUCCAGAACUGAGGAAUGCAG | 12444 | CTCCAGAACTGAGGAATGCAG |
| 6780 | CUCCAGACUGACCAUCGAGGG | 12445 | CTCCAGACTGACCATCGAGGG |
| 6781 | CUCCAGACUGACCAUCUGUCU | 12446 | CTCCAGACTGACCATCTGTCT |
| 6782 | CUCCAGGCAGAUGUUCACGCC | 12447 | CTCCAGGCAGATGTTCACGCC |
| 6783 | CUCCAGGUUCACGCAGAGCUG | 12448 | CTCCAGGTTCACGCAGAGCTG |
| 6784 | CUCCCAAAAAGCGUUGCACAC | 12449 | CTCCCAAAAAGCGTTGCACAC |
| 6785 | CUCCCAAAGUGCUGGGAUUAC | 12450 | CTCCCAAAGTGCTGGGATTAC |
| 6786 | CUCCCAAGUAGCUGGGAUCAC | 12451 | CTCCCAAGTAGCTGGGATCAC |
| 6787 | CUCCCACCUCAGCCUCGCCAU | 12452 | CTCCCACCTCAGCCTCGCCAT |
| 6788 | CUCCCAGAAGCCACUCAUACA | 12453 | CTCCCAGAAGCCACTCATACA |
| 6789 | CUCCCAGAUGAAUAAAUAUAU | 12454 | CTCCCAGATGAATAAATATAT |
| 6790 | CUCCCCUUUCAUCUUCCAUGU | 12455 | CTCCCCTTTCATCTTCCATGT |
| 6791 | CUCCCGAGUAGCUGGGACUAC | 12456 | CTCCCGAGTAGCTGGGACTAC |
| 6792 | CUCCCUGAAUAACGUUUUCCU | 12457 | CTCCCTGAATAACGTTTTCCT |
| 6793 | CUCCGAAACCAGAAAGGCUUA | 12458 | CTCCGAAACCAGAAAGGCTTA |
| 6794 | CUCCGCUUCCCGGGUUCACAC | 12459 | CTCCGCTTCCCGGGTTCACAC |
| 6795 | CUCCGGACAUCAGUGCAACAG | 12460 | CTCCGGACATCAGTGCAACAG |
| 6796 | CUCCGGGGACCCGGGACUUGU | 12461 | CTCCGGGGACCCGGGACTTGT |
| 6797 | CUCCGGUCCAGCGUCAUCUUC | 12462 | CTCCGGTCCAGCGTCATCTTC |
| 6798 | CUCCGUGGCGAUGGGGAGGAC | 12463 | CTCCGTGGCGATGGGGAGGAC |
| 6799 | CUCCGUGUCCAGAGCGACCAC | 12464 | CTCCGTGTCCAGAGCGACCAC |
| 6800 | CUCCUCAUGUCCCUGGCCAGC | 12465 | CTCCTCATGTCCCTGGCCAGC |
| 6801 | CUCCUCUUGGCUGGGUGAGGU | 12466 | CTCCTCTTGGCTGGGTGAGGT |
| 6802 | CUCCUGAACUCAAGUGAUCCA | 12467 | CTCCTGAACTCAAGTGATCCA |
| 6803 | CUCCUGACCUCAUGAUCCACC | 12468 | CTCCTGACCTCATGATCCACC |
| 6804 | CUCCUGAGUUUAGGGGUUUGG | 12469 | CTCCTGAGTTTAGGGGTTTGG |
| 6805 | CUCCUGCCUCAGCCUCCCAAG | 12470 | CTCCTGCCTCAGCCTCCCAAG |
| 6806 | CUCCUGCCUCAGCCUCCCGAG | 12471 | CTCCTGCCTCAGCCTCCCGAG |
| 6807 | CUCCUGGGACUCAUCAGAGCC | 12472 | CTCCTGGGACTCATCAGAGCC |
| 6808 | CUCCUGGGCUCAGGCGAUCCU | 12473 | CTCCTGGGCTCAGGCGATCCT |
| 6809 | CUCCUGGGUGGCCACUGCAGC | 12474 | CTCCTGGGTGGCCACTGCAGC |
| 6810 | CUCGAAAGACACUGGGUGGGU | 12475 | CTCGAAAGACACTGGGTGGGT |
| 6811 | CUCGAAGGCCGAGCAGGGGCU | 12476 | CTCGAAGGCCGAGCAGGGGCT |
| 6812 | CUCGAGGGGUAGCUGUAGCCG | 12477 | CTCGAGGGGTAGCTGTAGCCG |
| 6813 | CUCGAUAUUCACGAUCACGGC | 12478 | CTCGATATTCACGATCACGGC |
| 6814 | CUCGAUCAUGGCUCACUGCAA | 12479 | CTCGATCATGGCTCACTGCAA |
| 6815 | CUCGAUCUCCUGACCUCAUGA | 12480 | CTCGATCTCCTGACCTCATGA |
| 6816 | CUCGCAGAGUGUCACAUUAAC | 12481 | CTCGCAGAGTGTCACATTAAC |
| 6817 | CUCGCAGAGUGUCAGACAGCC | 12482 | CTCGCAGAGTGTCAGACAGCC |
| 6818 | CUCGCAGCCUCUGCCAGGCAG | 12483 | CTCGCAGCCTCTGCCAGGCAG |
| 6819 | CUCGCCACUUAGGCAGUGGAA | 12484 | CTCGCCACTTAGGCAGTGGAA |
| 6820 | CUCGCCAUGCCUGGCCAGAGG | 12485 | CTCGCCATGCCTGGCCAGAGG |
| 6821 | CUCGCUCCGGUCCAGCGUCAU | 12486 | CTCGCTCCGGTCCAGCGTCAT |
| 6822 | CUCGCUCUGUCGCCCAGGCCA | 12487 | CTCGCTCTGTCGCCCAGGCCA |
| 6823 | CUCGCUUUGUUGCUCAGGCCU | 12488 | CTCGCTTTGTTGCTCAGGCCT |
| 6824 | CUCGGCCUCCCAAAGUGCUGG | 12489 | CTCGGCCTCCCAAAGTGCTGG |
| 6825 | CUCGGCUCACUGCAAGCUCCG | 12490 | CTCGGCTCACTGCAAGCTCCG |
| 6826 | CUCGGCUGCAGACCAAGGAGG | 12491 | CTCGGCTGCAGACCAAGGAGG |
| 6827 | CUCGGUGCCACCACGGAUUCA | 12492 | CTCGGTGCCACCACGGATTCA |
| 6828 | CUCGUAAGGAACCGAGGCCUU | 12493 | CTCGTAAGGAACCGAGGCCTT |
| 6829 | CUCGUAGCCGAUCUUAAGGUC | 12494 | CTCGTAGCCGATCTTAAGGTC |
| 6830 | CUCGUCAGAUUUGUCCUUGCA | 12495 | CTCGTCAGATTTGTCCTTGCA |
| 6831 | CUCGUCCUGGGAGCACGUCUU | 12496 | CTCGTCCTGGGAGCACGTCTT |
| 6832 | CUCGUCUGAGCCGUCCAAGCA | 12497 | CTCGTCTGAGCCGTCCAAGCA |
| 6833 | CUCGUCUGAGCCGUUGUCGCA | 12498 | CTCGTCTGAGCCGTTGTCGCA |
| 6834 | CUCGUGCCGGUUGGUGAAGAA | 12499 | CTCGTGCCGGTTGGTGAAGAA |
| 6835 | CUCGUGUAUGUCGCGGAGGCG | 12500 | CTCGTGTATGTCGCGGAGGCG |
| 6836 | CUCGUUUCUUUCGCAUCUGUC | 12501 | CTCGTTTCTTTCGCATCTGTC |
| 6837 | CUCUAGCCAUGUUGCAGACUU | 12502 | CTCTAGCCATGTTGCAGACTT |
| 6838 | CUCUCACACCAGUUCACUCCU | 12503 | CTCTCACACCAGTTCACTCCT |
| 6839 | CUCUCCGGACAUCAGUGCAAC | 12504 | CTCTCCGGACATCAGTGCAAC |
| 6840 | CUCUCUGUCCCCGGCAUUCAU | 12505 | CTCTCTGTCCCCGGCATTCAT |
| 6841 | CUCUCUUGGCUGGGUGAGGUU | 12506 | CTCTCTTGGCTGGGTGAGGTT |
| 6842 | CUCUGAACUGAGAAAGUGCAA | 12507 | CTCTGAACTGAGAAAGTGCAA |
| 6843 | CUCUGCCAGCAACGUCGCCCA | 12508 | CTCTGCCAGCAACGTCGCCCA |
| 6844 | CUCUGCCAGGCAGUGUCCCGA | 12509 | CTCTGCCAGGCAGTGTCCCGA |
| 6845 | CUCUGCCUCUGGGAAGUGGCA | 12510 | CTCTGCCTCTGGGAAGTGGCA |
| 6846 | CUCUGCUGAUGACGGUGUCAU | 12511 | CTCTGCTGATGACGGTGTCAT |
| 6847 | CUCUGGCAGGCAAUGCUUUGG | 12512 | CTCTGGCAGGCAATGCTTTGG |
| 6848 | CUCUGGGAAGUGGCAUCAUUU | 12513 | CTCTGGGAAGTGGCATCATTT |
| 6849 | CUCUGGGACAGGUCAGACCAG | 12514 | CTCTGGGACAGGTCAGACCAG |
| 6850 | CUCUGGGCCUGACAUCCCCUC | 12515 | CTCTGGGCCTGACATCCCCTC |
| 6851 | CUCUGGGGACAGUAGGUUUUC | 12516 | CTCTGGGGACAGTAGGTTTTC |
| 6852 | CUCUGUCAAGCUGGGUGCUGC | 12517 | CTCTGTCAAGCTGGGTGCTGC |
| 6853 | CUCUGUCACACAGCUGCCCCC | 12518 | CTCTGTCACACAGCTGCCCCC |
| 6854 | CUCUGUCCCCGGCAUUCAUUG | 12519 | CTCTGTCCCCGGCATTCATTG |
| 6855 | CUCUGUCGCCCAGGCCAGACU | 12520 | CTCTGTCGCCCAGGCCAGACT |
| 6856 | CUCUGUCUUUGAAUAAAACAA | 12521 | CTCTGTCTTTGAATAAAACAA |
| 6857 | CUCUGUGAACUUGAUCGGGGC | 12522 | CTCTGTGAACTTGATCGGGGC |
| 6858 | CUCUGUGAGGCAGCUCCUCAU | 12523 | CTCTGTGAGGCAGCTCCTCAT |
| 6859 | CUCUGUGGUCUUCUGAUAGAC | 12524 | CTCTGTGGTCTTCTGATAGAC |
| 6860 | CUCUUAUCCUUCACGAGGAAA | 12525 | CTCTTATCCTTCACGAGGAAA |
| 6861 | CUCUUCACGCCCUUGGUAUCC | 12526 | CTCTTCACGCCCTTGGTATCC |
| 6862 | CUCUUGGCUGGGUGAGGUUGU | 12527 | CTCTTGGCTGGGTGAGGTTGT |
| 6863 | CUCUUUGAUGGGUUCAUCUGA | 12528 | CTCTTTGATGGGTTCATCTGA |
| 6864 | CUCUUUUCAUCCUCCAAGAUG | 12529 | CTCTTTTCATCCTCCAAGATG |
| 6865 | CUGAAAAUGGCUUCGUUGAUG | 12530 | CTGAAAATGGCTTCGTTGATG |
| 6866 | CUGAAAUAGGGUCUUCAUCUG | 12531 | CTGAAATAGGGTCTTCATCTG |
| 6867 | CUGAACAAAUACAGCAACCAG | 12532 | CTGAACAAATACAGCAACCAG |
| 6868 | CUGAACUCAAGUGAUCCAGCU | 12533 | CTGAACTCAAGTGATCCAGCT |
| 6869 | CUGAACUGAGAAAGUGCAAGG | 12534 | CTGAACTGAGAAAGTGCAAGG |
| 6870 | CUGAAGAUCUCGGCUGCAGAC | 12535 | CTGAAGATCTCGGCTGCAGAC |
| 6871 | CUGAAGUCCCCGGAUUUGCAG | 12536 | CTGAAGTCCCCGGATTTGCAG |
| 6872 | CUGAAGUCCCGUCAAACGAUC | 12537 | CTGAAGTCCCGTCAAACGATC |
| 6873 | CUGAAUAACGUUUUCCUCUUC | 12538 | CTGAATAACGTTTTCCTCTTC |
| 6874 | CUGAAUGUUUUCAGUCACCAG | 12539 | CTGAATGTTTTCAGTCACCAG |
| 6875 | CUGACACUCAUCGAUAUCGCA | 12540 | CTGACACTCATCGATATCGCA |
| 6876 | CUGACACUCAUCGAUAUCUUC | 12541 | CTGACACTCATCGATATCTTC |
| 6877 | CUGACAGCCACACCUGGGUGC | 12542 | CTGACAGCCACACCTGGGTGC |
| 6878 | CUGACAUCCCCUCCCCUUUCA | 12543 | CTGACATCCCCTCCCCTTTCA |
| 6879 | CUGACCAGUCCCGGCAGUCUC | 12544 | CTGACCAGTCCCGGCAGTCTC |
| 6880 | CUGACCAUCGAGGGGUAGCUG | 12545 | CTGACCATCGAGGGGTAGCTG |
| 6881 | CUGACCAUCUGUCUCGAGGGG | 12546 | CTGACCATCTGTCTCGAGGGG |
| 6882 | CUGACCUCAUGAUCCACCCGC | 12547 | CTGACCTCATGATCCACCCGC |
| 6883 | CUGACCUCGUGCCGGUUGGUG | 12548 | CTGACCTCGTGCCGGTTGGTG |
| 6884 | CUGACCUUUAGCCUGACGGUG | 12549 | CTGACCTTTAGCCTGACGGTG |
| 6885 | CUGACGGAGGCUGUCACUGUC | 12550 | CTGACGGAGGCTGTCACTGTC |
| 6886 | CUGACGGUGGAUGUCUCCUGG | 12551 | CTGACGGTGGATGTCTCCTGG |
| 6887 | CUGAGAAAGUGCAAGGAGACC | 12552 | CTGAGAAAGTGCAAGGAGACC |
| 6888 | CUGAGCCGUCCAAGCAGUCCC | 12553 | CTGAGCCGTCCAAGCAGTCCC |
| 6889 | CUGAGCCGUUGUCGCAGUCCA | 12554 | CTGAGCCGTTGTCGCAGTCCA |
| 6890 | CUGAGCUCAAACCAUCCUCCC | 12555 | CTGAGCTCAAACCATCCTCCC |
| 6891 | CUGAGGAAUGCAGCGGUUGAC | 12556 | CTGAGGAATGCAGCGGTTGAC |
| 6892 | CUGAGGAGAUCUAGGGUGAUG | 12557 | CTGAGGAGATCTAGGGTGATG |
| 6893 | CUGAGGCAACGUUUCAACCUC | 12558 | CTGAGGCAACGTTTCAACCTC |
| 6894 | CUGAGUCACAGACGAACUGCC | 12559 | CTGAGTCACAGACGAACTGCC |
| 6895 | CUGAGUUUAGGGGUUUGGCUU | 12560 | CTGAGTTTAGGGGTTTGGCTT |
| 6896 | CUGAUAGACGGGGUUGUCAAA | 12561 | CTGATAGACGGGGTTGTCAAA |
| 6897 | CUGAUGACGGUGUCAUAGGAA | 12562 | CTGATGACGGTGTCATAGGAA |
| 6898 | CUGAUGCACCAUGCAUGGUUU | 12563 | CTGATGCACCATGCATGGTTT |
| 6899 | CUGAUUUUUAACUUUUUGGUU | 12564 | CTGATTTTTAACTTTTTGGTT |
| 6900 | CUGCAACCUCCACCUCCUGGG | 12565 | CTGCAACCTCCACCTCCTGGG |
| 6901 | CUGCAAGCUCCGCUUCCCGGG | 12566 | CTGCAAGCTCCGCTTCCCGGG |
| 6902 | CUGCACUGGGGGGGACACAGU | 12567 | CTGCACTGGGGGGGACACAGT |
| 6903 | CUGCAGACCAAGGAGGGGCGG | 12568 | CTGCAGACCAAGGAGGGGCGG |
| 6904 | CUGCAGAUCAUUCUCUGGGAC | 12569 | CTGCAGATCATTCTCTGGGAC |
| 6905 | CUGCAGCCUCAGCCUCUCUUG | 12570 | CTGCAGCCTCAGCCTCTCTTG |
| 6906 | CUGCAGCCUCAGCCUCUGUGA | 12571 | CTGCAGCCTCAGCCTCTGTGA |
| 6907 | CUGCAGGUGUCGGGAUCCUGA | 12572 | CTGCAGGTGTCGGGATCCTGA |
| 6908 | CUGCAGUCCCCGCCGCGGCGA | 12573 | CTGCAGTCCCCGCCGCGGCGA |
| 6909 | CUGCAGUGGCGCAAUCUCGGC | 12574 | CTGCAGTGGCGCAATCTCGGC |
| 6910 | CUGCCAGCAACGUCGCCCAGA | 12575 | CTGCCAGCAACGTCGCCCAGA |
| 6911 | CUGCCAGGCAGUGUCCCGACC | 12576 | CTGCCAGGCAGTGTCCCGACC |
| 6912 | CUGCCAUCGCAGACCCACUUG | 12577 | CTGCCATCGCAGACCCACTTG |
| 6913 | CUGCCAUGGAUGCAGUUUCCA | 12578 | CTGCCATGGATGCAGTTTCCA |
| 6914 | CUGCCCCCGAGACCAGAGACC | 12579 | CTGCCCCCGAGACCAGAGACC |
| 6915 | CUGCCCCUCUCUGUCCCCGGC | 12580 | CTGCCCCTCTCTGTCCCCGGC |
| 6916 | CUGCCGAGAGAUGCACUUCCC | 12581 | CTGCCGAGAGATGCACTTCCC |
| 6917 | CUGCCGGCUGCCAUGGAUGCA | 12582 | CTGCCGGCTGCCATGGATGCA |
| 6918 | CUGCCUCAGCCUCCCAAGUAG | 12583 | CTGCCTCAGCCTCCCAAGTAG |
| 6919 | CUGCCUCAGCCUCCCGAGUAG | 12584 | CTGCCTCAGCCTCCCGAGTAG |
| 6920 | CUGCCUCCCAGAUGAAUAAAU | 12585 | CTGCCTCCCAGATGAATAAAT |
| 6921 | CUGCCUCUGGGAAGUGGCAUC | 12586 | CTGCCTCTGGGAAGTGGCATC |
| 6922 | CUGCGCCCGGCCUCACCGUGC | 12587 | CTGCGCCCGGCCTCACCGTGC |
| 6923 | CUGCGGACUGCAGUGGCGCAA | 12588 | CTGCGGACTGCAGTGGCGCAA |
| 6924 | CUGCGGCCACUCAUCCGAGCC | 12589 | CTGCGGCCACTCATCCGAGCC |
| 6925 | CUGCGGGGCAGGGAGGCACAG | 12590 | CTGCGGGGCAGGGAGGCACAG |
| 6926 | CUGCUGAUGACGGUGUCAUAG | 12591 | CTGCTGATGACGGTGTCATAG |
| 6927 | CUGCUGAUGCACCAUGCAUGG | 12592 | CTGCTGATGCACCATGCATGG |
| 6928 | CUGCUGUGUCCUAGCUGGAAA | 12593 | CTGCTGTGTCCTAGCTGGAAA |
| 6929 | CUGCUGUUGUGUGUUGAAAGC | 12594 | CTGCTGTTGTGTGTTGAAAGC |
| 6930 | CUGGAAACCCUGGCUUCCCGC | 12595 | CTGGAAACCCTGGCTTCCCGC |
| 6931 | CUGGAAAGCAGUGGCAUAAUC | 12596 | CTGGAAAGCAGTGGCATAATC |
| 6932 | CUGGAACUCGUUUCUUUCGCA | 12597 | CTGGAACTCGTTTCTTTCGCA |
| 6933 | CUGGAAGCCGUCGGGGCACAG | 12598 | CTGGAAGCCGTCGGGGCACAG |
| 6934 | CUGGAAGCCUUCCUCACACUG | 12599 | CTGGAAGCCTTCCTCACACTG |
| 6935 | CUGGAAGCUGGCGGGACCACA | 12600 | CTGGAAGCTGGCGGGACCACA |
| 6936 | CUGGAAUUCGUCAGGGCGACA | 12601 | CTGGAATTCGTCAGGGCGACA |
| 6937 | CUGGAGAGAAAUGGAGGUGUC | 12602 | CTGGAGAGAAATGGAGGTGTC |
| 6938 | CUGGAGGAUUUAUUUAUUUUU | 12603 | CTGGAGGATTTATTTATTTTT |
| 6939 | CUGGAGUGCAGUGGCUCGAUC | 12604 | CTGGAGTGCAGTGGCTCGATC |
| 6940 | CUGGAGUGGAUGCACUCGCCA | 12605 | CTGGAGTGGATGCACTCGCCA |
| 6941 | CUGGAUGUCUCUGCUGAUGAC | 12606 | CTGGATGTCTCTGCTGATGAC |
| 6942 | CUGGCACUCAGCGCUGCCAUC | 12607 | CTGGCACTCAGCGCTGCCATC |
| 6943 | CUGGCACUUGUAGCCACCCUC | 12608 | CTGGCACTTGTAGCCACCCTC |
| 6944 | CUGGCAGCCGCCAUUGCUCAG | 12609 | CTGGCAGCCGCCATTGCTCAG |
| 6945 | CUGGCAGGCAAUGCUUUGGUC | 12610 | CTGGCAGGCAATGCTTTGGTC |
| 6946 | CUGGCCAAAUUCAUUUUUUAA | 12611 | CTGGCCAAATTCATTTTTTAA |
| 6947 | CUGGCCACCUCCGUGUCCAGA | 12612 | CTGGCCACCTCCGTGTCCAGA |
| 6948 | CUGGCCAGAGGCCAUGGGCUG | 12613 | CTGGCCAGAGGCCATGGGCTG |
| 6949 | CUGGCCAGCAGCAUGCCGUCC | 12614 | CTGGCCAGCAGCATGCCGTCC |
| 6950 | CUGGCCUGGGAUCCCAUCCCA | 12615 | CTGGCCTGGGATCCCATCCCA |
| 6951 | CUGGCGGGACCACAGGUGAGC | 12616 | CTGGCGGGACCACAGGTGAGC |
| 6952 | CUGGCUGCAGGUGUCGGGAUC | 12617 | CTGGCTGCAGGTGTCGGGATC |
| 6953 | CUGGCUGUCUAGCAAGGCUUG | 12618 | CTGGCTGTCTAGCAAGGCTTG |
| 6954 | CUGGCUUAAGGAAGGUACAAA | 12619 | CTGGCTTAAGGAAGGTACAAA |
| 6955 | CUGGCUUCCCGCGAUUGCACU | 12620 | CTGGCTTCCCGCGATTGCACT |
| 6956 | CUGGGAAGUGGCAUCAUUUGG | 12621 | CTGGGAAGTGGCATCATTTGG |
| 6957 | CUGGGACAGGUCAGACCAGUA | 12622 | CTGGGACAGGTCAGACCAGTA |
| 6958 | CUGGGACUACAGGUGCCCGCC | 12623 | CTGGGACTACAGGTGCCCGCC |
| 6959 | CUGGGACUCAUCAGAGCCAUC | 12624 | CTGGGACTCATCAGAGCCATC |
| 6960 | CUGGGAGCACGUCUUGGGGGA | 12625 | CTGGGAGCACGTCTTGGGGGA |
| 6961 | CUGGGAGCACGUCUUGGGGGG | 12626 | CTGGGAGCACGTCTTGGGGGG |
| 6962 | CUGGGAUCACAGGCACGUGCC | 12627 | CTGGGATCACAGGCACGTGCC |
| 6963 | CUGGGAUCCCAUCCCAACACA | 12628 | CTGGGATCCCATCCCAACACA |
| 6964 | CUGGGAUUACAGGCGUGAGCC | 12629 | CTGGGATTACAGGCGTGAGCC |
| 6965 | CUGGGAUUACAGGCGUGAGGC | 12630 | CTGGGATTACAGGCGTGAGGC |
| 6966 | CUGGGCAGGGACGGGACUCCA | 12631 | CTGGGCAGGGACGGGACTCCA |
| 6967 | CUGGGCCACCAGCUGGAAGCC | 12632 | CTGGGCCACCAGCTGGAAGCC |
| 6968 | CUGGGCCUGACAUCCCCUCCC | 12633 | CTGGGCCTGACATCCCCTCCC |
| 6969 | CUGGGCUCAGGCGAUCCUCCU | 12634 | CTGGGCTCAGGCGATCCTCCT |
| 6970 | CUGGGCUUCUUCUCAUUUCCU | 12635 | CTGGGCTTCTTCTCATTTCCT |
| 6971 | CUGGGGACAAUUGCCAAUCCC | 12636 | CTGGGGACAATTGCCAATCCC |
| 6972 | CUGGGGACAGUAGGUUUUCAG | 12637 | CTGGGGACAGTAGGTTTTCAG |
| 6973 | CUGGGGGAUGCAGGUGGAGCU | 12638 | CTGGGGGATGCAGGTGGAGCT |
| 6974 | CUGGGGGGGACACAGUGUUUU | 12639 | CTGGGGGGGACACAGTGTTTT |
| 6975 | CUGGGUGAGGUUGUGGAAGAG | 12640 | CTGGGTGAGGTTGTGGAAGAG |
| 6976 | CUGGGUGCAGGCCACGUGUCC | 12641 | CTGGGTGCAGGCCACGTGTCC |
| 6977 | CUGGGUGCUGCAGAUCAUUCU | 12642 | CTGGGTGCTGCAGATCATTCT |
| 6978 | CUGGGUGGCCACUGCAGCCUC | 12643 | CTGGGTGGCCACTGCAGCCTC |
| 6979 | CUGGGUGGGUCAUGAUUCGGG | 12644 | CTGGGTGGGTCATGATTCGGG |
| 6980 | CUGGUCCCCCCGGGCCUGUUU | 12645 | CTGGTCCCCCCGGGCCTGTTT |
| 6981 | CUGGUCUCCAACUCCUGAACU | 12646 | CTGGTCTCCAACTCCTGAACT |
| 6982 | CUGGUGGGGCGAGGGCGCCCC | 12647 | CTGGTGGGGCGAGGGCGCCCC |
| 6983 | CUGGUGUACUCGCUCCGGUCC | 12648 | CTGGTGTACTCGCTCCGGTCC |
| 6984 | CUGGUGUCCUGACAGCCACAC | 12649 | CTGGTGTCCTGACAGCCACAC |
| 6985 | CUGGUUGUGGCAAAUGUGGAC | 12650 | CTGGTTGTGGCAAATGTGGAC |
| 6986 | CUGUACAGGGACGCAUUUACG | 12651 | CTGTACAGGGACGCATTTACG |
| 6987 | CUGUAGCCGUCCUGGUUGUGG | 12652 | CTGTAGCCGTCCTGGTTGTGG |
| 6988 | CUGUAGGGAGAGGCACGCUCU | 12653 | CTGTAGGGAGAGGCACGCTCT |
| 6989 | CUGUCAAGCUGGGUGCUGCAG | 12654 | CTGTCAAGCTGGGTGCTGCAG |
| 6990 | CUGUCACACAGCUGCCCCCGA | 12655 | CTGTCACACAGCTGCCCCCGA |
| 6991 | CUGUCACUGUCUCUCCGGACA | 12656 | CTGTCACTGTCTCTCCGGACA |
| 6992 | CUGUCCAAAAUACUUUGUCCU | 12657 | CTGTCCAAAATACTTTGTCCT |
| 6993 | CUGUCCCCGGCAUUCAUUGAC | 12658 | CTGTCCCCGGCATTCATTGAC |
| 6994 | CUGUCCCCUUGGAACACGUAA | 12659 | CTGTCCCCTTGGAACACGTAA |
| 6995 | CUGUCCGAAGCCUGUUCUGCC | 12660 | CTGTCCGAAGCCTGTTCTGCC |
| 6996 | CUGUCGCCCACGUGGCUGAAG | 12661 | CTGTCGCCCACGTGGCTGAAG |
| 6997 | CUGUCGCCCACUGCAGUCCCC | 12662 | CTGTCGCCCACTGCAGTCCCC |
| 6998 | CUGUCGCCCAGGCCAGACUGC | 12663 | CTGTCGCCCAGGCCAGACTGC |
| 6999 | CUGUCUAGCAAGGCUUGCAUA | 12664 | CTGTCTAGCAAGGCTTGCATA |
| 7000 | CUGUCUCGAGGGGUAGCUGUA | 12665 | CTGTCTCGAGGGGTAGCTGTA |
| 7001 | CUGUCUCUCCGGACAUCAGUG | 12666 | CTGTCTCTCCGGACATCAGTG |
| 7002 | CUGUCUUUGAAUAAAACAAGG | 12667 | CTGTCTTTGAATAAAACAAGG |
| 7003 | CUGUGAACUUGAUCGGGGCUG | 12668 | CTGTGAACTTGATCGGGGCTG |
| 7004 | CUGUGACACUUGAACUUGUUG | 12669 | CTGTGACACTTGAACTTGTTG |
| 7005 | CUGUGAGGCAGCUCCUCAUGU | 12670 | CTGTGAGGCAGCTCCTCATGT |
| 7006 | CUGUGAGGCGGUUGGCACUGA | 12671 | CTGTGAGGCGGTTGGCACTGA |
| 7007 | CUGUGGAGCUGACCUUUAGCC | 12672 | CTGTGGAGCTGACCTTTAGCC |
| 7008 | CUGUGGAUCCAGUCCACAGCC | 12673 | CTGTGGATCCAGTCCACAGCC |
| 7009 | CUGUGGUCUUCUGAUAGACGG | 12674 | CTGTGGTCTTCTGATAGACGG |
| 7010 | CUGUGUCCUAGCUGGAAACCC | 12675 | CTGTGTCCTAGCTGGAAACCC |
| 7011 | CUGUGUCCUUACGGCUGUGGA | 12676 | CTGTGTCCTTACGGCTGTGGA |
| 7012 | CUGUGUCUGGCCAAAUUCAUU | 12677 | CTGTGTCTGGCCAAATTCATT |
| 7013 | CUGUUCUGCCUCCCAGAUGAA | 12678 | CTGTTCTGCCTCCCAGATGAA |
| 7014 | CUGUUGAUGUUCUUAAGCCGC | 12679 | CTGTTGATGTTCTTAAGCCGC |
| 7015 | CUGUUGCACUGGAAGCUGGCG | 12680 | CTGTTGCACTGGAAGCTGGCG |
| 7016 | CUGUUGCCCAGGCUGGAGUGC | 12681 | CTGTTGCCCAGGCTGGAGTGC |
| 7017 | CUGUUGUGUGUUGAAAGCCAC | 12682 | CTGTTGTGTGTTGAAAGCCAC |
| 7018 | CUGUUUCUCUUAUCCUUCACG | 12683 | CTGTTTCTCTTATCCTTCACG |
| 7019 | CUUAAGCCGCCAGUUCUUCCA | 12684 | CTTAAGCCGCCAGTTCTTCCA |
| 7020 | CUUAAGGAAGGUACAAACCCA | 12685 | CTTAAGGAAGGTACAAACCCA |
| 7021 | CUUAAGGUCAUUGCAGACGUG | 12686 | CTTAAGGTCATTGCAGACGTG |
| 7022 | CUUAAUAAAUAUUAAGGGUGA | 12687 | CTTAATAAATATTAAGGGTGA |
| 7023 | CUUACGGCUGUGGAGCUGACC | 12688 | CTTACGGCTGTGGAGCTGACC |
| 7024 | CUUACUAUGUUGCCCAGGCUG | 12689 | CTTACTATGTTGCCCAGGCTG |
| 7025 | CUUAGAGAUUGGUGGAUGAGG | 12690 | CTTAGAGATTGGTGGATGAGG |
| 7026 | CUUAGGCAGUGGAACUCGAAG | 12691 | CTTAGGCAGTGGAACTCGAAG |
| 7027 | CUUAUCACGGUUCCCUGCACU | 12692 | CTTATCACGGTTCCCTGCACT |
| 7028 | CUUAUCCUUCACGAGGAAAGG | 12693 | CTTATCCTTCACGAGGAAAGG |
| 7029 | CUUCACGAGGAAAGGAAGAAA | 12694 | CTTCACGAGGAAAGGAAGAAA |
| 7030 | CUUCACGCCCUUGGUAUCCGC | 12695 | CTTCACGCCCTTGGTATCCGC |
| 7031 | CUUCACGCGGGAGUCUGACGG | 12696 | CTTCACGCGGGAGTCTGACGG |
| 7032 | CUUCAUCGCUCAUGUCCUUGC | 12697 | CTTCATCGCTCATGTCCTTGC |
| 7033 | CUUCAUCUGUUGCCCAGGCUG | 12698 | CTTCATCTGTTGCCCAGGCTG |
| 7034 | CUUCCAUAGAAGGAAGACCCC | 12699 | CTTCCATAGAAGGAAGACCCC |
| 7035 | CUUCCAUGUUUGAGGAUUGUG | 12700 | CTTCCATGTTTGAGGATTGTG |
| 7036 | CUUCCCAUCGUGGCAGCGAAA | 12701 | CTTCCCATCGTGGCAGCGAAA |
| 7037 | CUUCCCGGGUUCACACCAUUC | 12702 | CTTCCCGGGTTCACACCATTC |
| 7038 | CUUCCGGUUGCCCCCGUUGAC | 12703 | CTTCCGGTTGCCCCCGTTGAC |
| 7039 | CUUCCUCACACUGGCACUUGU | 12704 | CTTCCTCACACTGGCACTTGT |
| 7040 | CUUCCUGACCUCGUGCCGGUU | 12705 | CTTCCTGACCTCGTGCCGGTT |
| 7041 | CUUCCUGGAGAGAAAUGGAGG | 12706 | CTTCCTGGAGAGAAATGGAGG |
| 7042 | CUUCGCAGUCGGGGUCGUUGU | 12707 | CTTCGCAGTCGGGGTCGTTGT |
| 7043 | CUUCGCAUCUUCGCUGGGCCA | 12708 | CTTCGCATCTTCGCTGGGCCA |
| 7044 | CUUCGCCAGGAGGGCCCAGGA | 12709 | CTTCGCCAGGAGGGCCCAGGA |
| 7045 | CUUCGCUGGGCCACCAGCUGG | 12710 | CTTCGCTGGGCCACCAGCTGG |
| 7046 | CUUCGUGUGGGGGUCCAGCUG | 12711 | CTTCGTGTGGGGGTCCAGCTG |
| 7047 | CUUCGUUGAUGAUAUCUGUCC | 12712 | CTTCGTTGATGATATCTGTCC |
| 7048 | CUUCUAUACAGUGGUUUAAAA | 12713 | CTTCTATACAGTGGTTTAAAA |
| 7049 | CUUCUCAUUUCCUCUGCCAGC | 12714 | CTTCTCATTTCCTCTGCCAGC |
| 7050 | CUUCUCUGGGCCUGACAUCCC | 12715 | CTTCTCTGGGCCTGACATCCC |
| 7051 | CUUCUCUGUCUUUGAAUAAAA | 12716 | CTTCTCTGTCTTTGAATAAAA |
| 7052 | CUUCUGAUAGACGGGGUUGUC | 12717 | CTTCTGATAGACGGGGTTGTC |
| 7053 | CUUCUUCUCAUUUCCUCUGCC | 12718 | CTTCTTCTCATTTCCTCTGCC |
| 7054 | CUUGAACUUGUUGGGUCCCUC | 12719 | CTTGAACTTGTTGGGTCCCTC |
| 7055 | CUUGAGAUGGAGUGAAGUUUG | 12720 | CTTGAGATGGAGTGAAGTTTG |
| 7056 | CUUGAGGGUGGCCGGGGGCCC | 12721 | CTTGAGGGTGGCCGGGGGCCC |
| 7057 | CUUGAUCGGGGCUGGUGGGGC | 12722 | CTTGATCGGGGCTGGTGGGGC |
| 7058 | CUUGAUCUUGGCGGGAGUUCC | 12723 | CTTGATCTTGGCGGGAGTTCC |
| 7059 | CUUGCAGGCCUUCGUGUGGGG | 12724 | CTTGCAGGCCTTCGTGTGGGG |
| 7060 | CUUGCAGUCAUAUUCCCGGUC | 12725 | CTTGCAGTCATATTCCCGGTC |
| 7061 | CUUGCAGUCGGGGCCACCAUC | 12726 | CTTGCAGTCGGGGCCACCATC |
| 7062 | CUUGCAUAGAAGAGGUAAACA | 12727 | CTTGCATAGAAGAGGTAAACA |
| 7063 | CUUGCUCGUCUGAGCCGUUGU | 12728 | CTTGCTCGTCTGAGCCGTTGT |
| 7064 | CUUGCUUCUCUGGGCCUGACA | 12729 | CTTGCTTCTCTGGGCCTGACA |
| 7065 | CUUGGAACACGUAAAGACCCC | 12730 | CTTGGAACACGTAAAGACCCC |
| 7066 | CUUGGAGCCGUUCUCCCUGAA | 12731 | CTTGGAGCCGTTCTCCCTGAA |
| 7067 | CUUGGAGGCAUUUGCAUAGAA | 12732 | CTTGGAGGCATTTGCATAGAA |
| 7068 | CUUGGCACUGGAACUCGUUUC | 12733 | CTTGGCACTGGAACTCGTTTC |
| 7069 | CUUGGCCAUCGCACCUCCAGA | 12734 | CTTGGCCATCGCACCTCCAGA |
| 7070 | CUUGGCGGGAGUUCCCCAGUC | 12735 | CTTGGCGGGAGTTCCCCAGTC |
| 7071 | CUUGGCUGGGUGAGGUUGUGG | 12736 | CTTGGCTGGGTGAGGTTGTGG |
| 7072 | CUUGGCUUGGAGCCGUUCUCC | 12737 | CTTGGCTTGGAGCCGTTCTCC |
| 7073 | CUUGGGCGAGUGGGGGUUGAU | 12738 | CTTGGGCGAGTGGGGGTTGAT |
| 7074 | CUUGGGGGAGCACGUCUCCUG | 12739 | CTTGGGGGAGCACGTCTCCTG |
| 7075 | CUUGGGGGGACAGCCUUGCUC | 12740 | CTTGGGGGGACAGCCTTGCTC |
| 7076 | CUUGGUAUCCGCAACAGAGAC | 12741 | CTTGGTATCCGCAACAGAGAC |
| 7077 | CUUGGUGAGACAUUGUCACUA | 12742 | CTTGGTGAGACATTGTCACTA |
| 7078 | CUUGUAGCCACCCUCCAGGUU | 12743 | CTTGTAGCCACCCTCCAGGTT |
| 7079 | CUUGUAGGAGAUGCAUUUCCC | 12744 | CTTGTAGGAGATGCATTTCCC |
| 7080 | CUUGUCGUCGCCUUUGUGACA | 12745 | CTTGTCGTCGCCTTTGTGACA |
| 7081 | CUUGUGACAUCUUCACGCGGG | 12746 | CTTGTGACATCTTCACGCGGG |
| 7082 | CUUGUUGGGUCCCUCGCAGAG | 12747 | CTTGTTGGGTCCCTCGCAGAG |
| 7083 | CUUUAGCCUGACGGUGGAUGU | 12748 | CTTTAGCCTGACGGTGGATGT |
| 7084 | CUUUCAUCUUCCAUGUUUGAG | 12749 | CTTTCATCTTCCATGTTTGAG |
| 7085 | CUUUCCCUGGCCUGGGAUCCC | 12750 | CTTTCCCTGGCCTGGGATCCC |
| 7086 | CUUUCCUGGCUUAAGGAAGGU | 12751 | CTTTCCTGGCTTAAGGAAGGT |
| 7087 | CUUUCGCAUCUGUCGCCCACG | 12752 | CTTTCGCATCTGTCGCCCACG |
| 7088 | CUUUCGCAUCUGUCGCCCACU | 12753 | CTTTCGCATCTGTCGCCCACT |
| 7089 | CUUUCUUGAUCUUGGCGGGAG | 12754 | CTTTCTTGATCTTGGCGGGAG |
| 7090 | CUUUGAAGUCCCGGUCAACCU | 12755 | CTTTGAAGTCCCGGTCAACCT |
| 7091 | CUUUGAAUAAAACAAGGCCGG | 12756 | CTTTGAATAAAACAAGGCCGG |
| 7092 | CUUUGAUGGGUUCAUCUGACC | 12757 | CTTTGATGGGTTCATCTGACC |
| 7093 | CUUUGGUCUUCUCUGUCUUUG | 12758 | CTTTGGTCTTCTCTGTCTTTG |
| 7094 | CUUUGUACAUAAAGAAGAGGC | 12759 | CTTTGTACATAAAGAAGAGGC |
| 7095 | CUUUGUCCAGGGUGAUGCAUU | 12760 | CTTTGTCCAGGGTGATGCATT |
| 7096 | CUUUGUCCUCAAAGACGGCCA | 12761 | CTTTGTCCTCAAAGACGGCCA |
| 7097 | CUUUGUGACAGGAACCGCGGA | 12762 | CTTTGTGACAGGAACCGCGGA |
| 7098 | CUUUGUUGCUCAGGCCUGGUC | 12763 | CTTTGTTGCTCAGGCCTGGTC |
| 7099 | CUUUUCAUCCUCCAAGAUGGU | 12764 | CTTTTCATCCTCCAAGATGGT |
| 7100 | CUUUUUGGUUUUUGUAGAGAU | 12765 | CTTTTTGGTTTTTGTAGAGAT |
| 7101 | GAAAACAGUGCAAAAUAAUAA | 12766 | GAAAACAGTGCAAAATAATAA |
| 7102 | GAAAAUGGCUUCGUUGAUGAU | 12767 | GAAAATGGCTTCGTTGATGAT |
| 7103 | GAAACCAAAAUCCCAACCCAA | 12768 | GAAACCAAAATCCCAACCCAA |
| 7104 | GAAACCAGAAAGGCUUAUCAC | 12769 | GAAACCAGAAAGGCTTATCAC |
| 7105 | GAAACCCUGGCUUCCCGCGAU | 12770 | GAAACCCTGGCTTCCCGCGAT |
| 7106 | GAAACCGGGGACUUCGCCAGG | 12771 | GAAACCGGGGACTTCGCCAGG |
| 7107 | GAAACUCAAAACUUCCUGGAG | 12772 | GAAACTCAAAACTTCCTGGAG |
| 7108 | GAAACUCGUCCUGGGAGCACG | 12773 | GAAACTCGTCCTGGGAGCACG |
| 7109 | GAAAGAACCUGAAGUCCCGUC | 12774 | GAAAGAACCTGAAGTCCCGTC |
| 7110 | GAAAGACACUGGGUGGGUCAU | 12775 | GAAAGACACTGGGTGGGTCAT |
| 7111 | GAAAGCAGUGGCAUAAUCAUA | 12776 | GAAAGCAGTGGCATAATCATA |
| 7112 | GAAAGCCACUUGCUUCUCUGG | 12777 | GAAAGCCACTTGCTTCTCTGG |
| 7113 | GAAAGGAAGAAACCAAAAUCC | 12778 | GAAAGGAAGAAACCAAAATCC |
| 7114 | GAAAGGCUUAUCACGGUUCCC | 12779 | GAAAGGCTTATCACGGTTCCC |
| 7115 | GAAAGUGCAAGGAGACCACGG | 12780 | GAAAGTGCAAGGAGACCACGG |
| 7116 | GAAAUAGGGUCUUCAUCUGUU | 12781 | GAAATAGGGTCTTCATCTGTT |
| 7117 | GAAAUGGAGGUGUCAUCCUGG | 12782 | GAAATGGAGGTGTCATCCTGG |
| 7118 | GAAAUUUAAUUGAUCACAGUA | 12783 | GAAATTTAATTGATCACAGTA |
| 7119 | GAACAAAUACAGCAACCAGGG | 12784 | GAACAAATACAGCAACCAGGG |
| 7120 | GAACACGUAAAGACCCCUACA | 12785 | GAACACGTAAAGACCCCTACA |
| 7121 | GAACAGCCGCCGUUGUUGUCC | 12786 | GAACAGCCGCCGTTGTTGTCC |
| 7122 | GAACAGGAUCCACCACGAUGG | 12787 | GAACAGGATCCACCACGATGG |
| 7123 | GAACAGGUCGGGUGGUUGUGU | 12788 | GAACAGGTCGGGTGGTTGTGT |
| 7124 | GAACCAUAUCCUCUGGGGACA | 12789 | GAACCATATCCTCTGGGGACA |
| 7125 | GAACCGAGGCCUUGAGGGUGG | 12790 | GAACCGAGGCCTTGAGGGTGG |
| 7126 | GAACCGCGGAGGAACGCCAGG | 12791 | GAACCGCGGAGGAACGCCAGG |
| 7127 | GAACCUGAAGUCCCGUCAAAC | 12792 | GAACCTGAAGTCCCGTCAAAC |
| 7128 | GAACCUGUGAGGCGGUUGGCA | 12793 | GAACCTGTGAGGCGGTTGGCA |
| 7129 | GAACUCAAGUGAUCCAGCUCA | 12794 | GAACTCAAGTGATCCAGCTCA |
| 7130 | GAACUCGAAGGCCGAGCAGGG | 12795 | GAACTCGAAGGCCGAGCAGGG |
| 7131 | GAACUCGUUUCUUUCGCAUCU | 12796 | GAACTCGTTTCTTTCGCATCT |
| 7132 | GAACUGAGAAAGUGCAAGGAG | 12797 | GAACTGAGAAAGTGCAAGGAG |
| 7133 | GAACUGAGGAAUGCAGCGGUU | 12798 | GAACTGAGGAATGCAGCGGTT |
| 7134 | GAACUGCCGAGAGAUGCACUU | 12799 | GAACTGCCGAGAGATGCACTT |
| 7135 | GAACUUGAUCGGGGCUGGUGG | 12800 | GAACTTGATCGGGGCTGGTGG |
| 7136 | GAACUUGUUGGGUCCCUCGCA | 12801 | GAACTTGTTGGGTCCCTCGCA |
| 7137 | GAAGAAACCAAAAUCCCAACC | 12802 | GAAGAAACCAAAATCCCAACC |
| 7138 | GAAGAAGAGGUAGGCGAUGGA | 12803 | GAAGAAGAGGTAGGCGATGGA |
| 7139 | GAAGACCCCCAGGCAAAGGAA | 12804 | GAAGACCCCCAGGCAAAGGAA |
| 7140 | GAAGACGAGGAGCACGAUGGG | 12805 | GAAGACGAGGAGCACGATGGG |
| 7141 | GAAGACGAGGAGCACUGUAGG | 12806 | GAAGACGAGGAGCACTGTAGG |
| 7142 | GAAGAGAACCAUAUCCUCUGG | 12807 | GAAGAGAACCATATCCTCTGG |
| 7143 | GAAGAGACGCCGUGGGCUCUG | 12808 | GAAGAGACGCCGTGGGCTCTG |
| 7144 | GAAGAGGCAUUUCAGAGGCAA | 12809 | GAAGAGGCATTTCAGAGGCAA |
| 7145 | GAAGAGGUAAACACGUUGACU | 12810 | GAAGAGGTAAACACGTTGACT |
| 7146 | GAAGAGGUAGGCGAUGGAGCC | 12811 | GAAGAGGTAGGCGATGGAGCC |
| 7147 | GAAGAUCUCGGCUGCAGACCA | 12812 | GAAGATCTCGGCTGCAGACCA |
| 7148 | GAAGCACUAGGUGGGCGGACA | 12813 | GAAGCACTAGGTGGGCGGACA |
| 7149 | GAAGCCACUCAUACAUACAAC | 12814 | GAAGCCACTCATACATACAAC |
| 7150 | GAAGCCAUGAACAGGAUCCAC | 12815 | GAAGCCATGAACAGGATCCAC |
| 7151 | GAAGCCGUCGGGGCACAGGCA | 12816 | GAAGCCGTCGGGGCACAGGCA |
| 7152 | GAAGCCUGUUCUGCCUCCCAG | 12817 | GAAGCCTGTTCTGCCTCCCAG |
| 7153 | GAAGCCUUCCUCACACUGGCA | 12818 | GAAGCCTTCCTCACACTGGCA |
| 7154 | GAAGCUGGCGGGACCACAGGU | 12819 | GAAGCTGGCGGGACCACAGGT |
| 7155 | GAAGGAAGACCCCCAGGCAAA | 12820 | GAAGGAAGACCCCCAGGCAAA |
| 7156 | GAAGGCCGAGCAGGGGCUACU | 12821 | GAAGGCCGAGCAGGGGCTACT |
| 7157 | GAAGGGGUGGGCCAGCCUCUU | 12822 | GAAGGGGTGGGCCAGCCTCTT |
| 7158 | GAAGGGUUCUGGGCAGGGACG | 12823 | GAAGGGTTCTGGGCAGGGACG |
| 7159 | GAAGGUACAAACCCACCUCGA | 12824 | GAAGGTACAAACCCACCTCGA |
| 7160 | GAAGUCCCCGGAUUUGCAGGU | 12825 | GAAGTCCCCGGATTTGCAGGT |
| 7161 | GAAGUCCCGGUCAACCUGCCC | 12826 | GAAGTCCCGGTCAACCTGCCC |
| 7162 | GAAGUCCCGUCAAACGAUCCA | 12827 | GAAGTCCCGTCAAACGATCCA |
| 7163 | GAAGUGAAUGGCUUGGAGGCA | 12828 | GAAGTGAATGGCTTGGAGGCA |
| 7164 | GAAGUGGAAGCACUAGGUGGG | 12829 | GAAGTGGAAGCACTAGGTGGG |
| 7165 | GAAGUGGCAUCAUUUGGUGAA | 12830 | GAAGTGGCATCATTTGGTGAA |
| 7166 | GAAGUGGGUAGGGGUCGGGAG | 12831 | GAAGTGGGTAGGGGTCGGGAG |
| 7167 | GAAGUUUGGAGUCAACCCAGU | 12832 | GAAGTTTGGAGTCAACCCAGT |
| 7168 | GAAUAAAACAAGGCCGGCGAG | 12833 | GAATAAAACAAGGCCGGCGAG |
| 7169 | GAAUAAAUAUAUAAAACAAAG | 12834 | GAATAAATATATAAAACAAAG |
| 7170 | GAAUAACGUUUUCCUCUUCAC | 12835 | GAATAACGTTTTCCTCTTCAC |
| 7171 | GAAUAGUCACUGAACAAAUAC | 12836 | GAATAGTCACTGAACAAATAC |
| 7172 | GAAUCCCUUUCCUGGCUUAAG | 12837 | GAATCCCTTTCCTGGCTTAAG |
| 7173 | GAAUGAGUUUGGUCUCGGUGC | 12838 | GAATGAGTTTGGTCTCGGTGC |
| 7174 | GAAUGCAGCGGUUGACACGGC | 12839 | GAATGCAGCGGTTGACACGGC |
| 7175 | GAAUGGAAGUGGGUAGGGGUC | 12840 | GAATGGAAGTGGGTAGGGGTC |
| 7176 | GAAUGGCUUGGAGGCAUUUGC | 12841 | GAATGGCTTGGAGGCATTTGC |
| 7177 | GAAUGUUUUCAGUCACCAGCG | 12842 | GAATGTTTTCAGTCACCAGCG |
| 7178 | GAAUUCGUCAGGGCGACAGGU | 12843 | GAATTCGTCAGGGCGACAGGT |
| 7179 | GACAAGAUUGGGGAAGUGAAU | 12844 | GACAAGATTGGGGAAGTGAAT |
| 7180 | GACAAGCACGUCUCCUGGGAC | 12845 | GACAAGCACGTCTCCTGGGAC |
| 7181 | GACAAGGUGGGGACGGAGGUG | 12846 | GACAAGGTGGGGACGGAGGTG |
| 7182 | GACAAUGGACAGAGCCCUCAC | 12847 | GACAATGGACAGAGCCCTCAC |
| 7183 | GACAAUGGCAGUUCUCGAUAU | 12848 | GACAATGGCAGTTCTCGATAT |
| 7184 | GACAAUUGCCAAUCCCUUGUG | 12849 | GACAATTGCCAATCCCTTGTG |
| 7185 | GACACAGUGUUUUGUCCCUGG | 12850 | GACACAGTGTTTTGTCCCTGG |
| 7186 | GACACCCAUCUCCCAGAAGCC | 12851 | GACACCCATCTCCCAGAAGCC |
| 7187 | GACACGGCCCCCACAGCUGAA | 12852 | GACACGGCCCCCACAGCTGAA |
| 7188 | GACACGGGCUUUCCCUGGCCU | 12853 | GACACGGGCTTTCCCTGGCCT |
| 7189 | GACACUCAUCGAUAUCGCACU | 12854 | GACACTCATCGATATCGCACT |
| 7190 | GACACUCAUCGAUAUCUUCGC | 12855 | GACACTCATCGATATCTTCGC |
| 7191 | GACACUGGGUGGGUCAUGAUU | 12856 | GACACTGGGTGGGTCATGATT |
| 7192 | GACACUUGAACUUGUUGGGUC | 12857 | GACACTTGAACTTGTTGGGTC |
| 7193 | GACAGAAAACAGUGCAAAAUA | 12858 | GACAGAAAACAGTGCAAAATA |
| 7194 | GACAGACAAGCACGUCUCCUG | 12859 | GACAGACAAGCACGTCTCCTG |
| 7195 | GACAGAGCCCUCACGCUACUG | 12860 | GACAGAGCCCTCACGCTACTG |
| 7196 | GACAGAGUCGGUCCAGUAGAU | 12861 | GACAGAGTCGGTCCAGTAGAT |
| 7197 | GACAGCCACACCUGGGUGCAG | 12862 | GACAGCCACACCTGGGTGCAG |
| 7198 | GACAGCCUCAAAUGCCUGAGC | 12863 | GACAGCCTCAAATGCCTGAGC |
| 7199 | GACAGCCUUGCUCGUCUGAGC | 12864 | GACAGCCTTGCTCGTCTGAGC |
| 7200 | GACAGGAACCGCGGAGGAACG | 12865 | GACAGGAACCGCGGAGGAACG |
| 7201 | GACAGGGCAAAGGCUAACCUG | 12866 | GACAGGGCAAAGGCTAACCTG |
| 7202 | GACAGGUCAGACCAGUAGAUU | 12867 | GACAGGTCAGACCAGTAGATT |
| 7203 | GACAGGUGGCCACAGCGCAGU | 12868 | GACAGGTGGCCACAGCGCAGT |
| 7204 | GACAGGUGGCCACAGGACAGC | 12869 | GACAGGTGGCCACAGGACAGC |
| 7205 | GACAGUAGGUUUUCAGCCAAC | 12870 | GACAGTAGGTTTTCAGCCAAC |
| 7206 | GACAGUGCCCAGGACAGAGUC | 12871 | GACAGTGCCCAGGACAGAGTC |
| 7207 | GACAUAAAGACGACAAUGGCA | 12872 | GACATAAAGACGACAATGGCA |
| 7208 | GACAUCAGUGCAACAGUAACA | 12873 | GACATCAGTGCAACAGTAACA |
| 7209 | GACAUCAUUCUCCCAAAAAGC | 12874 | GACATCATTCTCCCAAAAAGC |
| 7210 | GACAUCCCCUCCCCUUUCAUC | 12875 | GACATCCCCTCCCCTTTCATC |
| 7211 | GACAUCGAUGCUUGAGAUGGA | 12876 | GACATCGATGCTTGAGATGGA |
| 7212 | GACAUCGGAACCUGUGAGGCG | 12877 | GACATCGGAACCTGTGAGGCG |
| 7213 | GACAUCUUCACGCGGGAGUCU | 12878 | GACATCTTCACGCGGGAGTCT |
| 7214 | GACAUUCAGGCUACAAAAACC | 12879 | GACATTCAGGCTACAAAAACC |
| 7215 | GACAUUGUCACUAUCUCCACC | 12880 | GACATTGTCACTATCTCCACC |
| 7216 | GACCAAGGAGGGGGGGGGAGA | 12881 | GACCAAGGAGGGGGGGGAGA |
| 7217 | GACCACAGGUGAGCACCGGGC | 12882 | GACCACAGGTGAGCACCGGGC |
| 7218 | GACCACGGGAAUGGAAGUGGG | 12883 | GACCACGGGAATGGAAGTGGG |
| 7219 | GACCACGUUCCUCAGGUUGGG | 12884 | GACCACGTTCCTCAGGTTGGG |
| 7220 | GACCAGAGACCCAGCUCCGUG | 12885 | GACCAGAGACCCAGCTCCGTG |
| 7221 | GACCAGUAGAUUCUAUUGCUG | 12886 | GACCAGTAGATTCTATTGCTG |
| 7222 | GACCAGUCCCGGCAGUCUCUA | 12887 | GACCAGTCCCGGCAGTCTCTA |
| 7223 | GACCAGUGACUCAGGCUCUGC | 12888 | GACCAGTGACTCAGGCTCTGC |
| 7224 | GACCAUCGAGGGGUAGCUGUA | 12889 | GACCATCGAGGGGTAGCTGTA |
| 7225 | GACCAUCUGUCUCGAGGGGUA | 12890 | GACCATCTGTCTCGAGGGGTA |
| 7226 | GACCCACUUGUAGGAGAUGCA | 12891 | GACCCACTTGTAGGAGATGCA |
| 7227 | GACCCAGCUCCGUGGCGAUGG | 12892 | GACCCAGCTCCGTGGCGATGG |
| 7228 | GACCCCCAGGCAAAGGAAGAC | 12893 | GACCCCCAGGCAAAGGAAGAC |
| 7229 | GACCCCUACAGCGCUGCGGCC | 12894 | GACCCCTACAGCGCTGCGGCC |
| 7230 | GACCCGGAUCACGACCUGCUG | 12895 | GACCCGGATCACGACCTGCTG |
| 7231 | GACCCGGGACUUGUCGUCGCC | 12896 | GACCCGGGACTTGTCGTCGCC |
| 7232 | GACCUCAUCCUCUGUGGUCUU | 12897 | GACCTCATCCTCTGTGGTCTT |
| 7233 | GACCUCAUGAUCCACCCGCCU | 12898 | GACCTCATGATCCACCCGCCT |
| 7234 | GACCUCGUGCCGGUUGGUGAA | 12899 | GACCTCGTGCCGGTTGGTGAA |
| 7235 | GACCUGCUGUGUCCUAGCUGG | 12900 | GACCTGCTGTGTCCTAGCTGG |
| 7236 | GACCUUUAGCCUGACGGUGGA | 12901 | GACCTTTAGCCTGACGGTGGA |
| 7237 | GACGAACUGCCGAGAGAUGCA | 12902 | GACGAACTGCCGAGAGATGCA |
| 7238 | GACGACAAUGGCAGUUCUCGA | 12903 | GACGACAATGGCAGTTCTCGA |
| 7239 | GACGAGGAGCACGAUGGGGAG | 12904 | GACGAGGAGCACGATGGGGAG |
| 7240 | GACGAGGAGCACUGUAGGGAG | 12905 | GACGAGGAGCACTGTAGGGAG |
| 7241 | GACGCAUUUACGUGCUCCGAA | 12906 | GACGCATTTACGTGCTCCGAA |
| 7242 | GACGCCAUGAAUCCCUUUCCU | 12907 | GACGCCATGAATCCCTTTCCT |
| 7243 | GACGCCGUGGGCUCUGUCAAG | 12908 | GACGCCGTGGGCTCTGTCAAG |
| 7244 | GACGGAGGCUGUCACUGUCUC | 12909 | GACGGAGGCTGTCACTGTCTC |
| 7245 | GACGGAGGUGUCGCCACAGAG | 12910 | GACGGAGGTGTCGCCACAGAG |
| 7246 | GACGGAGUCUCGCUCUGUCGC | 12911 | GACGGAGTCTCGCTCTGTCGC |
| 7247 | GACGGCCAAGGAGAAGGGGUG | 12912 | GACGGCCAAGGAGAAGGGGTG |
| 7248 | GACGGGACUCCAGGCAGAUGU | 12913 | GACGGGACTCCAGGCAGATGT |
| 7249 | GACGGGGUUGUCAAAGUUGAU | 12914 | GACGGGGTTGTCAAAGTTGAT |
| 7250 | GACGGGGUUUCACGUGUUAGC | 12915 | GACGGGGTTTCACGTGTTAGC |
| 7251 | GACGGUCCAGCGCAAUUUCCA | 12916 | GACGGTCCAGCGCAATTTCCA |
| 7252 | GACGGUGGAUGUCUCCUGGGU | 12917 | GACGGTGGATGTCTCCTGGGT |
| 7253 | GACGGUGUCAUAGGAAGAGAC | 12918 | GACGGTGTCATAGGAAGAGAC |
| 7254 | GACGUGGGAACAGCCGCCGUU | 12919 | GACGTGGGAACAGCCGCCGTT |
| 7255 | GACUACAGGUGCCCGCCACCA | 12920 | GACTACAGGTGCCCGCCACCA |
| 7256 | GACUCAGGCUCUGCCUCUGGG | 12921 | GACTCAGGCTCTGCCTCTGGG |
| 7257 | GACUCAUCAGAGCCAUCCUGG | 12922 | GACTCATCAGAGCCATCCTGG |
| 7258 | GACUCCAGGCAGAUGUUCACG | 12923 | GACTCCAGGCAGATGTTCACG |
| 7259 | GACUCCUGAGUUUAGGGGUUU | 12924 | GACTCCTGAGTTTAGGGGTTT |
| 7260 | GACUCGUGUAUGUCGCGGAGG | 12925 | GACTCGTGTATGTCGCGGAGG |
| 7261 | GACUGACCAUCGAGGGGUAGC | 12926 | GACTGACCATCGAGGGGTAGC |
| 7262 | GACUGACCAUCUGUCUCGAGG | 12927 | GACTGACCATCTGTCTCGAGG |
| 7263 | GACUGCAGUGGCGCAAUCUCG | 12928 | GACTGCAGTGGCGCAATCTCG |
| 7264 | GACUGCGGACUGCAGUGGCGC | 12929 | GACTGCGGACTGCAGTGGCGC |
| 7265 | GACUGGAGGAUUUAUUUAUUU | 12930 | GACTGGAGGATTTATTTATTT |
| 7266 | GACUUCGCCAGGAGGGCCCAG | 12931 | GACTTCGCCAGGAGGGCCCAG |
| 7267 | GACUUGUCGUCGCCUUUGUGA | 12932 | GACTTGTCGTCGCCTTTGTGA |
| 7268 | GACUUUGUCCAGGGUGAUGCA | 12933 | GACTTTGTCCAGGGTGATGCA |
| 7269 | GAGAAACUCAAAACUUCCUGG | 12934 | GAGAAACTCAAAACTTCCTGG |
| 7270 | GAGAAAGUGCAAGGAGACCAC | 12935 | GAGAAAGTGCAAGGAGACCAC |
| 7271 | GAGAAAUGGAGGUGUCAUCCU | 12936 | GAGAAATGGAGGTGTCATCCT |
| 7272 | GAGAACCAUAUCCUCUGGGGA | 12937 | GAGAACCATATCCTCTGGGGA |
| 7273 | GAGAAGGGGUGGGCCAGCCUC | 12938 | GAGAAGGGGTGGGCCAGCCTC |
| 7274 | GAGAAUAGUCACUGAACAAAU | 12939 | GAGAATAGTCACTGAACAAAT |
| 7275 | GAGACAGUGCCCAGGACAGAG | 12940 | GAGACAGTGCCCAGGACAGAG |
| 7276 | GAGACAUUGUCACUAUCUCCA | 12941 | GAGACATTGTCACTATCTCCA |
| 7277 | GAGACCACGGGAAUGGAAGUG | 12942 | GAGACCACGGGAATGGAAGTG |
| 7278 | GAGACCAGAGACCCAGCUCCG | 12943 | GAGACCAGAGACCCAGCTCCG |
| 7279 | GAGACCCAGCUCCGUGGCGAU | 12944 | GAGACCCAGCTCCGTGGCGAT |
| 7280 | GAGACGCCGUGGGCUCUGUCA | 12945 | GAGACGCCGTGGGCTCTGTCA |
| 7281 | GAGACGGAGUCUCGCUCUGUC | 12946 | GAGACGGAGTCTCGCTCTGTC |
| 7282 | GAGACGGGGUUUCACGUGUUA | 12947 | GAGACGGGGTTTCACGTGTTA |
| 7283 | GAGAGAAACUCAAAACUUCCU | 12948 | GAGAGAAACTCAAAACTTCCT |
| 7284 | GAGAGAAAUGGAGGUGUCAUC | 12949 | GAGAGAAATGGAGGTGTCATC |
| 7285 | GAGAGAUGCACUUCCCAUCGU | 12950 | GAGAGATGCACTTCCCATCGT |
| 7286 | GAGAGGCACGCUCUGUCACAC | 12951 | GAGAGGCACGCTCTGTCACAC |
| 7287 | GAGAUCUAGGGUGAUGCCAUU | 12952 | GAGATCTAGGGTGATGCCATT |
| 7288 | GAGAUGCACUUCCCAUCGUGG | 12953 | GAGATGCACTTCCCATCGTGG |
| 7289 | GAGAUGCAUUUCCCGUCUUGG | 12954 | GAGATGCATTTCCCGTCTTGG |
| 7290 | GAGAUGGAGUGAAGUUUGGAG | 12955 | GAGATGGAGTGAAGTTTGGAG |
| 7291 | GAGAUGGGAUCUCGCUUUGUU | 12956 | GAGATGGGATCTCGCTTTGTT |
| 7292 | GAGAUGGGGUCUUACUAUGUU | 12957 | GAGATGGGGTCTTACTATGTT |
| 7293 | GAGAUUCUGAGGCAACGUUUC | 12958 | GAGATTCTGAGGCAACGTTTC |
| 7294 | GAGAUUGGUGGAUGAGGCAGG | 12959 | GAGATTGGTGGATGAGGCAGG |
| 7295 | GAGCAAGGCGACGGUCCAGCG | 12960 | GAGCAAGGCGACGGTCCAGCG |
| 7296 | GAGCACAGCGGAAACCGGGGA | 12961 | GAGCACAGCGGAAACCGGGGA |
| 7297 | GAGCACCGGGCAGGAGGCCUC | 12962 | GAGCACCGGGCAGGAGGCCTC |
| 7298 | GAGCACGAUGGGGAGGACAAU | 12963 | GAGCACGATGGGGAGGACAAT |
| 7299 | GAGCACGUCUCCUGGGACUCA | 12964 | GAGCACGTCTCCTGGGACTCA |
| 7300 | GAGCACGUCUUGGGGGAGCAC | 12965 | GAGCACGTCTTGGGGGAGCAC |
| 7301 | GAGCACGUCUUGGGGGGACAG | 12966 | GAGCACGTCTTGGGGGGACAG |
| 7302 | GAGCACUGGAAUUCGUCAGGG | 12967 | GAGCACTGGAATTCGTCAGGG |
| 7303 | GAGCACUGUAGGGAGAGGCAC | 12968 | GAGCACTGTAGGGAGAGGCAC |
| 7304 | GAGCAGGGGCUACUGUCCCCU | 12969 | GAGCAGGGGCTACTGTCCCCT |
| 7305 | GAGCCACUGCGCCCGGCCUCA | 12970 | GAGCCACTGCGCCCGGCCTCA |
| 7306 | GAGCCAUCCUGGCACUCAGCG | 12971 | GAGCCATCCTGGCACTCAGCG |
| 7307 | GAGCCAUCUUCGCAGUCGGGG | 12972 | GAGCCATCTTCGCAGTCGGGG |
| 7308 | GAGCCCACAGCCUUGCAGGCC | 12973 | GAGCCCACAGCCTTGCAGGCC |
| 7309 | GAGCCCAGGGGUGGCCCCAGG | 12974 | GAGCCCAGGGGTGGCCCCAGG |
| 7310 | GAGCCCUCACGCUACUGGGCU | 12975 | GAGCCCTCACGCTACTGGGCT |
| 7311 | GAGCCGUCCAAGCAGUCCCGG | 12976 | GAGCCGTCCAAGCAGTCCCGG |
| 7312 | GAGCCGUUCUCCCUGAAUAAC | 12977 | GAGCCGTTCTCCCTGAATAAC |
| 7313 | GAGCCGUUGUCGCAGUCCACU | 12978 | GAGCCGTTGTCGCAGTCCACT |
| 7314 | GAGCGACCACGUUCCUCAGGU | 12979 | GAGCGACCACGTTCCTCAGGT |
| 7315 | GAGCUCAAACCAUCCUCCCAC | 12980 | GAGCTCAAACCATCCTCCCAC |
| 7316 | GAGCUGACCUUUAGCCUGACG | 12981 | GAGCTGACCTTTAGCCTGACG |
| 7317 | GAGCUGGCUGCAGGUGUCGGG | 12982 | GAGCTGGCTGCAGGTGTCGGG |
| 7318 | GAGCUGUUGCACUGGAAGCUG | 12983 | GAGCTGTTGCACTGGAAGCTG |
| 7319 | GAGCUUGGUGAGACAUUGUCA | 12984 | GAGCTTGGTGAGACATTGTCA |
| 7320 | GAGGAAAGGAAGAAACCAAAA | 12985 | GAGGAAAGGAAGAAACCAAAA |
| 7321 | GAGGAACGCCAGGCCUCCCCU | 12986 | GAGGAACGCCAGGCCTCCCCT |
| 7322 | GAGGAAUGCAGCGGUUGACAC | 12987 | GAGGAATGCAGCGGTTGACAC |
| 7323 | GAGGACAAUGGACAGAGCCCU | 12988 | GAGGACAATGGACAGAGCCCT |
| 7324 | GAGGAGAUCUAGGGUGAUGCC | 12989 | GAGGAGATCTAGGGTGATGCC |
| 7325 | GAGGAGCAAGGCGACGGUCCA | 12990 | GAGGAGCAAGGCGACGGTCCA |
| 7326 | GAGGAGCACGAUGGGGAGGAC | 12991 | GAGGAGCACGATGGGGAGGAC |
| 7327 | GAGGAGCACUGUAGGGAGAGG | 12992 | GAGGAGCACTGTAGGGAGAGG |
| 7328 | GAGGAUGGGCACCAGGCUGGU | 12993 | GAGGATGGGCACCAGGCTGGT |
| 7329 | GAGGAUUGUGUCACGGUGGAG | 12994 | GAGGATTGTGTCACGGTGGAG |
| 7330 | GAGGAUUUAUUUAUUUUUUUA | 12995 | GAGGATTTATTTATTTTTTTA |
| 7331 | GAGGCAACGUUUCAACCUCGU | 12996 | GAGGCAACGTTTCAACCTCGT |
| 7332 | GAGGCAAUAACCCCCUACACA | 12997 | GAGGCAATAACCCCCTACACA |
| 7333 | GAGGCACAGAUACUGGCAGCC | 12998 | GAGGCACAGATACTGGCAGCC |
| 7334 | GAGGCACCUGUGUCUGGCCAA | 12999 | GAGGCACCTGTGTCTGGCCAA |
| 7335 | GAGGCACGCUCUGUCACACAG | 13000 | GAGGCACGCTCTGTCACACAG |
| 7336 | GAGGCAGCUCCUCAUGUCCCU | 13001 | GAGGCAGCTCCTCATGTCCCT |
| 7337 | GAGGCAGGGCCAGGGGGUCCC | 13002 | GAGGCAGGGCCAGGGGGTCCC |
| 7338 | GAGGCAUUUCAGAGGCAAUAA | 13003 | GAGGCATTTCAGAGGCAATAA |
| 7339 | GAGGCAUUUGCAUAGAAGUGG | 13004 | GAGGCATTTGCATAGAAGTGG |
| 7340 | GAGGCCAUGGGCUGCUGAUGC | 13005 | GAGGCCATGGGCTGCTGATGC |
| 7341 | GAGGCCUCGUCUGAGCCGUCC | 13006 | GAGGCCTCGTCTGAGCCGTCC |
| 7342 | GAGGCCUUGAGGGUGGCCGGG | 13007 | GAGGCCTTGAGGGTGGCCGGG |
| 7343 | GAGGCGGCCACUGAGGAGAUC | 13008 | GAGGCGGCCACTGAGGAGATC |
| 7344 | GAGGCGGCUCCGGGGACCCGG | 13009 | GAGGCGGCTCCGGGGACCCGG |
| 7345 | GAGGCGGUUGGCACUGAAAAU | 13010 | GAGGCGGTTGGCACTGAAAAT |
| 7346 | GAGGCUGGUGUACUCGCUCCG | 13011 | GAGGCTGGTGTACTCGCTCCG |
| 7347 | GAGGCUGUCACUGUCUCUCCG | 13012 | GAGGCTGTCACTGTCTCTCCG |
| 7348 | GAGGGCCCAGGAUAACGGAGG | 13013 | GAGGGCCCAGGATAACGGAGG |
| 7349 | GAGGGCGACUCGUGUAUGUCG | 13014 | GAGGGCGACTCGTGTATGTCG |
| 7350 | GAGGGCGCCCCCCAGGACAAG | 13015 | GAGGGCGCCCCCCAGGACAAG |
| 7351 | GAGGGGGGGGGAGAUUCUGAG | 13016 | GAGGGGGGGGGAGATTCTGAG |
| 7352 | GAGGGGUAGCUGUAGCCGUCC | 13017 | GAGGGGTAGCTGTAGCCGTCC |
| 7353 | GAGGGUGGCCGGGGGCCCCUC | 13018 | GAGGGTGGCCGGGGGCCCCTC |
| 7354 | GAGGUAAACACGUUGACUCCU | 13019 | GAGGTAAACACGTTGACTCCT |
| 7355 | GAGGUAGGCGAUGGAGCCCAC | 13020 | GAGGTAGGCGATGGAGCCCAC |
| 7356 | GAGGUCUCAGGAAGGGUUCUG | 13021 | GAGGTCTCAGGAAGGGTTCTG |
| 7357 | GAGGUGUCAUCCUGGUCCCCC | 13022 | GAGGTGTCATCCTGGTCCCCC |
| 7358 | GAGGUGUCGCCACAGAGCACA | 13023 | GAGGTGTCGCCACAGAGCACA |
| 7359 | GAGGUGUCGGGAACAGGUCGG | 13024 | GAGGTGTCGGGAACAGGTCGG |
| 7360 | GAGGUUGUGGAAGAGAACCAU | 13025 | GAGGTTGTGGAAGAGAACCAT |
| 7361 | GAGUAGAUGUCCACACCAUUC | 13026 | GAGTAGATGTCCACACCATTC |
| 7362 | GAGUAGCUGGGACUACAGGUG | 13027 | GAGTAGCTGGGACTACAGGTG |
| 7363 | GAGUCAACCCAGUAGAGGCGG | 13028 | GAGTCAACCCAGTAGAGGCGG |
| 7364 | GAGUCACAGACGAACUGCCGA | 13029 | GAGTCACAGACGAACTGCCGA |
| 7365 | GAGUCGGUCCAGUAGAUGUUG | 13030 | GAGTCGGTCCAGTAGATGTTG |
| 7366 | GAGUCUCGCUCUGUCGCCCAG | 13031 | GAGTCTCGCTCTGTCGCCCAG |
| 7367 | GAGUCUGACGGAGGCUGUCAC | 13032 | GAGTCTGACGGAGGCTGTCAC |
| 7368 | GAGUGAAGUUUGGAGUCAACC | 13033 | GAGTGAAGTTTGGAGTCAACC |
| 7369 | GAGUGCAGUGGCUCGAUCAUG | 13034 | GAGTGCAGTGGCTCGATCATG |
| 7370 | GAGUGGAUGCACUCGCCACUU | 13035 | GAGTGGATGCACTCGCCACTT |
| 7371 | GAGUGGGGGUUGAUCUGCGGG | 13036 | GAGTGGGGGTTGATCTGCGGG |
| 7372 | GAGUGUCACAUUAACGCAGCC | 13037 | GAGTGTCACATTAACGCAGCC |
| 7373 | GAGUGUCAGACAGCCUUGCUC | 13038 | GAGTGTCAGACAGCCTTGCTC |
| 7374 | GAGUUCCCCAGUCAGUCCAGU | 13039 | GAGTTCCCCAGTCAGTCCAGT |
| 7375 | GAGUUUAGGGGUUUGGCUUAG | 13040 | GAGTTTAGGGGTTTGGCTTAG |
| 7376 | GAGUUUGGUCUCGGUGCCACC | 13041 | GAGTTTGGTCTCGGTGCCACC |
| 7377 | GAUAACAGUUUCAACCAAUAU | 13042 | GATAACAGTTTCAACCAATAT |
| 7378 | GAUAACGGAGGGCGACUCGUG | 13043 | GATAACGGAGGGCGACTCGTG |
| 7379 | GAUACUGGCAGCCGCCAUUGC | 13044 | GATACTGGCAGCCGCCATTGC |
| 7380 | GAUAGACGGGGUUGUCAAAGU | 13045 | GATAGACGGGGTTGTCAAAGT |
| 7381 | GAUAUCGCACUCUUUGAUGGG | 13046 | GATATCGCACTCTTTGATGGG |
| 7382 | GAUAUCUGUCCAAAAUACUUU | 13047 | GATATCTGTCCAAAATACTTT |
| 7383 | GAUAUCUUCGCAUCUUCGCUG | 13048 | GATATCTTCGCATCTTCGCTG |
| 7384 | GAUAUUCACGAUCACGGCUUU | 13049 | GATATTCACGATCACGGCTTT |
| 7385 | GAUCACAGGCACGUGCCACCG | 13050 | GATCACAGGCACGTGCCACCG |
| 7386 | GAUCACAGUAAGACAUUCAGG | 13051 | GATCACAGTAAGACATTCAGG |
| 7387 | GAUCACGACCUGCUGUGUCCU | 13052 | GATCACGACCTGCTGTGTCCT |
| 7388 | GAUCACGGCUUUGAAGUCCCG | 13053 | GATCACGGCTTTGAAGTCCCG |
| 7389 | GAUCAUGGCUCACUGCAACCU | 13054 | GATCATGGCTCACTGCAACCT |
| 7390 | GAUCAUUCUCUGGGACAGGUC | 13055 | GATCATTCTCTGGGACAGGTC |
| 7391 | GAUCAUUUCCGACGCCAUGAA | 13056 | GATCATTTCCGACGCCATGAA |
| 7392 | GAUCCACCACGAUGGCCCUUG | 13057 | GATCCACCACGATGGCCCTTG |
| 7393 | GAUCCACCCGCCUCGGCCUCC | 13058 | GATCCACCCGCCTCGGCCTCC |
| 7394 | GAUCCAGACUGGAGGAUUUAU | 13059 | GATCCAGACTGGAGGATTTAT |
| 7395 | GAUCCAGCUCAGCCUCCCAAA | 13060 | GATCCAGCTCAGCCTCCCAAA |
| 7396 | GAUCCAGUCCACAGCCAGCCC | 13061 | GATCCAGTCCACAGCCAGCCC |
| 7397 | GAUCCCAUCCCAACACACACG | 13062 | GATCCCATCCCAACACACACG |
| 7398 | GAUCCUCCUGCCUCAGCCUCC | 13063 | GATCCTCCTGCCTCAGCCTCC |
| 7399 | GAUCCUGACACUCAUCGAUAU | 13064 | GATCCTGACACTCATCGATAT |
| 7400 | GAUCGGGGCUGGUGGGGCGAG | 13065 | GATCGGGGCTGGTGGGGCGAG |
| 7401 | GAUCUAGGGUGAUGCCAUUGG | 13066 | GATCTAGGGTGATGCCATTGG |
| 7402 | GAUCUCCUGACCUCAUGAUCC | 13067 | GATCTCCTGACCTCATGATCC |
| 7403 | GAUCUCGCUUUGUUGCUCAGG | 13068 | GATCTCGCTTTGTTGCTCAGG |
| 7404 | GAUCUCGGCUGCAGACCAAGG | 13069 | GATCTCGGCTGCAGACCAAGG |
| 7405 | GAUCUGCGGGGCAGGGAGGCA | 13070 | GATCTGCGGGGCAGGGAGGCA |
| 7406 | GAUCUUAAGGUCAUUGCAGAC | 13071 | GATCTTAAGGTCATTGCAGAC |
| 7407 | GAUCUUGGCGGGAGUUCCCCA | 13072 | GATCTTGGCGGGAGTTCCCCA |
| 7408 | GAUGAAUAAAUAUAUAAAACA | 13073 | GATGAATAAATATATAAAACA |
| 7409 | GAUGACGGUGUCAUAGGAAGA | 13074 | GATGACGGTGTCATAGGAAGA |
| 7410 | GAUGAGGCAGGGCCAGGGGGU | 13075 | GATGAGGCAGGGCCAGGGGGT |
| 7411 | GAUGAGGCUGGUGUACUCGCU | 13076 | GATGAGGCTGGTGTACTCGCT |
| 7412 | GAUGAUAUCUGUCCAAAAUAC | 13077 | GATGATATCTGTCCAAAATAC |
| 7413 | GAUGCACCAUGCAUGGUUUUU | 13078 | GATGCACCATGCATGGTTTTT |
| 7414 | GAUGCACUCGCCACUUAGGCA | 13079 | GATGCACTCGCCACTTAGGCA |
| 7415 | GAUGCACUUCCCAUCGUGGCA | 13080 | GATGCACTTCCCATCGTGGCA |
| 7416 | GAUGCAGGUGGAGCUGUUGCA | 13081 | GATGCAGGTGGAGCTGTTGCA |
| 7417 | GAUGCAGUUUCCAUCAGAGCA | 13082 | GATGCAGTTTCCATCAGAGCA |
| 7418 | GAUGCAUUCGCCGCUGUGACA | 13083 | GATGCATTCGCCGCTGTGACA |
| 7419 | GAUGCAUUUCCCGUCUUGGCA | 13084 | GATGCATTTCCCGTCTTGGCA |
| 7420 | GAUGCCAUUGGGCCACUGAAU | 13085 | GATGCCATTGGGCCACTGAAT |
| 7421 | GAUGCUGUUGAUGUUCUUAAG | 13086 | GATGCTGTTGATGTTCTTAAG |
| 7422 | GAUGCUUGAGAUGGAGUGAAG | 13087 | GATGCTTGAGATGGAGTGAAG |
| 7423 | GAUGGAGCCCACAGCCUUGCA | 13088 | GATGGAGCCCACAGCCTTGCA |
| 7424 | GAUGGAGUGAAGUUUGGAGUC | 13089 | GATGGAGTGAAGTTTGGAGTC |
| 7425 | GAUGGCCCUUGGCUUGGAGCC | 13090 | GATGGCCCTTGGCTTGGAGCC |
| 7426 | GAUGGGAUCUCGCUUUGUUGC | 13091 | GATGGGATCTCGCTTTGTTGC |
| 7427 | GAUGGGCACCAGGCUGGUGUC | 13092 | GATGGGCACCAGGCTGGTGTC |
| 7428 | GAUGGGGAGGACAAUGGACAG | 13093 | GATGGGGAGGACAATGGACAG |
| 7429 | GAUGGGGUCUUACUAUGUUGC | 13094 | GATGGGGTCTTACTATGTTGC |
| 7430 | GAUGGGUUCAUCUGACCAGUC | 13095 | GATGGGTTCATCTGACCAGTC |
| 7431 | GAUGGUCUCGAUCUCCUGACC | 13096 | GATGGTCTCGATCTCCTGACC |
| 7432 | GAUGGUCUUCCGGUUGCCCCC | 13097 | GATGGTCTTCCGGTTGCCCCC |
| 7433 | GAUGUCCACACCAUUCAGGCC | 13098 | GATGTCCACACCATTCAGGCC |
| 7434 | GAUGUCUCCUGGGUGGCCACU | 13099 | GATGTCTCCTGGGTGGCCACT |
| 7435 | GAUGUCUCUGCUGAUGACGGU | 13100 | GATGTCTCTGCTGATGACGGT |
| 7436 | GAUGUUCACGCCACGUCAUCC | 13101 | GATGTTCACGCCACGTCATCC |
| 7437 | GAUGUUCUUAAGCCGCCAGUU | 13102 | GATGTTCTTAAGCCGCCAGTT |
| 7438 | GAUGUUGCUGUGGAUCCAGUC | 13103 | GATGTTGCTGTGGATCCAGTC |
| 7439 | GAUUACAGGCGUGAGCCACUG | 13104 | GATTACAGGCGTGAGCCACTG |
| 7440 | GAUUACAGGCGUGAGGCACCU | 13105 | GATTACAGGCGTGAGGCACCT |
| 7441 | GAUUCAGCCAGAUCAUUUCCG | 13106 | GATTCAGCCAGATCATTTCCG |
| 7442 | GAUUCGGGGGUGACAGGGCAA | 13107 | GATTCGGGGGTGACAGGGCAA |
| 7443 | GAUUCUAUUGCUGGCCACCUC | 13108 | GATTCTATTGCTGGCCACCTC |
| 7444 | GAUUCUGAGGCAACGUUUCAA | 13109 | GATTCTGAGGCAACGTTTCAA |
| 7445 | GAUUGGGGAAGUGAAUGGCUU | 13110 | GATTGGGGAAGTGAATGGCTT |
| 7446 | GAUUGGUGGAUGAGGCAGGGC | 13111 | GATTGGTGGATGAGGCAGGGC |
| 7447 | GAUUGUGUCACGGUGGAGAGA | 13112 | GATTGTGTCACGGTGGAGAGA |
| 7448 | GAUUUAUUUAUUUUUUUAUAG | 13113 | GATTTATTTATTTTTTTATAG |
| 7449 | GAUUUCAGAAAGAACCUGAAG | 13114 | GATTTCAGAAAGAACCTGAAG |
| 7450 | GAUUUGCAGGUGACAGACAAG | 13115 | GATTTGCAGGTGACAGACAAG |
| 7451 | GAUUUGUCCUUGCAGUCGGGG | 13116 | GATTTGTCCTTGCAGTCGGGG |
| 7452 | GAUUUUAUAUAUAUGUGUGUA | 13117 | GATTTTATATATATGTGTGTA |
| 7453 | GAUUUUUAACUUUUUGGUUUU | 13118 | GATTTTTAACTTTTTGGTTTT |
| 7454 | GCAAAAAUAAAUAGAUUUUAU | 13119 | GCAAAAATAAATAGATTTTAT |
| 7455 | GCAAAAUAAUAACACAAAUGC | 13120 | GCAAAATAATAACACAAATGC |
| 7456 | GCAAACAUAACAAAAAAUCCC | 13121 | GCAAACATAACAAAAAATCCC |
| 7457 | GCAAAGGAAGACGAGGAGCAC | 13122 | GCAAAGGAAGACGAGGAGCAC |
| 7458 | GCAAAGGCUAACCUGGCUGUC | 13123 | GCAAAGGCTAACCTGGCTGTC |
| 7459 | GCAAAUAAUCUUUGUACAUAA | 13124 | GCAAATAATCTTTGTACATAA |
| 7460 | GCAAAUGUGGACCUCAUCCUC | 13125 | GCAAATGTGGACCTCATCCTC |
| 7461 | GCAACAGAGACAGUGCCCAGG | 13126 | GCAACAGAGACAGTGCCCAGG |
| 7462 | GCAACAGUAACACGGCGAUUU | 13127 | GCAACAGTAACACGGCGATTT |
| 7463 | GCAACCAGGGUUUGCAAAAAU | 13128 | GCAACCAGGGTTTGCAAAAAT |
| 7464 | GCAACCUCCACCUCCUGGGCU | 13129 | GCAACCTCCACCTCCTGGGCT |
| 7465 | GCAACGUCGCCCAGAGCUUGG | 13130 | GCAACGTCGCCCAGAGCTTGG |
| 7466 | GCAACGUUUCAACCUCGUAAG | 13131 | GCAACGTTTCAACCTCGTAAG |
| 7467 | GCAAGCUCCGCUUCCCGGGUU | 13132 | GCAAGCTCCGCTTCCCGGGTT |
| 7468 | GCAAGGAGACCACGGGAAUGG | 13133 | GCAAGGAGACCACGGGAATGG |
| 7469 | GCAAGGCGACGGUCCAGCGCA | 13134 | GCAAGGCGACGGTCCAGCGCA |
| 7470 | GCAAGGCUUGCAUAGAAGAGG | 13135 | GCAAGGCTTGCATAGAAGAGG |
| 7471 | GCAAUAACCCCCUACACAGGG | 13136 | GCAATAACCCCCTACACAGGG |
| 7472 | GCAAUCUCGGCUCACUGCAAG | 13137 | GCAATCTCGGCTCACTGCAAG |
| 7473 | GCAAUGCUUUGGUCUUCUCUG | 13138 | GCAATGCTTTGGTCTTCTCTG |
| 7474 | GCAAUUUCCAGCCCCAGGGCC | 13139 | GCAATTTCCAGCCCCAGGGCC |
| 7475 | GCACACAGUCCAGUUCGUGCA | 13140 | GCACACAGTCCAGTTCGTGCA |
| 7476 | GCACAGAUACUGGCAGCCGCC | 13141 | GCACAGATACTGGCAGCCGCC |
| 7477 | GCACAGCGGAAACCGGGGACU | 13142 | GCACAGCGGAAACCGGGGACT |
| 7478 | GCACAGGCACUCGUAGCCGAU | 13143 | GCACAGGCACTCGTAGCCGAT |
| 7479 | GCACCAGGCUGGUGUCCUGAC | 13144 | GCACCAGGCTGGTGTCCTGAC |
| 7480 | GCACCAUGCAUGGUUUUUUUU | 13145 | GCACCATGCATGGTTTTTTTT |
| 7481 | GCACCGGGCAGGAGGCCUCGU | 13146 | GCACCGGGCAGGAGGCCTCGT |
| 7482 | GCACCUCCAGAACUGAGGAAU | 13147 | GCACCTCCAGAACTGAGGAAT |
| 7483 | GCACCUGUGUCUGGCCAAAUU | 13148 | GCACCTGTGTCTGGCCAAATT |
| 7484 | GCACGAUGGGGAGGACAAUGG | 13149 | GCACGATGGGGAGGACAATGG |
| 7485 | GCACGCUCUGUCACACAGCUG | 13150 | GCACGCTCTGTCACACAGCTG |
| 7486 | GCACGUCUCCUGGGACUCAUC | 13151 | GCACGTCTCCTGGGACTCATC |
| 7487 | GCACGUCUUGGGGGAGCACGU | 13152 | GCACGTCTTGGGGGAGCACGT |
| 7488 | GCACGUCUUGGGGGGACAGCC | 13153 | GCACGTCTTGGGGGGACAGCC |
| 7489 | GCACGUGCCACCGUACCCAGC | 13154 | GCACGTGCCACCGTACCCAGC |
| 7490 | GCACUAGGUGGGGGACAUAA | 13155 | GCACTAGGTGGGCGGACATAA |
| 7491 | GCACUCAGCGCUGCCAUCGCA | 13156 | GCACTCAGCGCTGCCATCGCA |
| 7492 | GCACUCGCCACUUAGGCAGUG | 13157 | GCACTCGCCACTTAGGCAGTG |
| 7493 | GCACUCGUAGCCGAUCUUAAG | 13158 | GCACTCGTAGCCGATCTTAAG |
| 7494 | GCACUCUUUGAUGGGUUCAUC | 13159 | GCACTCTTTGATGGGTTCATC |
| 7495 | GCACUGAAAAUGGCUUCGUUG | 13160 | GCACTGAAAATGGCTTCGTTG |
| 7496 | GCACUGGAACUCGUUUCUUUC | 13161 | GCACTGGAACTCGTTTCTTTC |
| 7497 | GCACUGGAAGCUGGCGGGACC | 13162 | GCACTGGAAGCTGGCGGGACC |
| 7498 | GCACUGGAAUUCGUCAGGGCG | 13163 | GCACTGGAATTCGTCAGGGCG |
| 7499 | GCACUGGGGGGGACACAGUGU | 13164 | GCACTGGGGGGGACACAGTGT |
| 7500 | GCACUGUAGGGAGAGGCACGC | 13165 | GCACTGTAGGGAGAGGCACGC |
| 7501 | GCACUGUCCGAAGCCUGUUCU | 13166 | GCACTGTCCGAAGCCTGTTCT |
| 7502 | GCACUUAAUAAAUAUUAAGGG | 13167 | GCACTTAATAAATATTAAGGG |
| 7503 | GCACUUCCCAUCGUGGCAGCG | 13168 | GCACTTCCCATCGTGGCAGCG |
| 7504 | GCACUUGUAGCCACCCUCCAG | 13169 | GCACTTGTAGCCACCCTCCAG |
| 7505 | GCAGACCAAGGAGGGGCGGGG | 13170 | GCAGACCAAGGAGGGGCGGGG |
| 7506 | GCAGACCCACUUGUAGGAGAU | 13171 | GCAGACCCACTTGTAGGAGAT |
| 7507 | GCAGACGUGGGAACAGCCGCC | 13172 | GCAGACGTGGGAACAGCCGCC |
| 7508 | GCAGACUUUGUCCAGGGUGAU | 13173 | GCAGACTTTGTCCAGGGTGAT |
| 7509 | GCAGAGCUGGCUGCAGGUGUC | 13174 | GCAGAGCTGGCTGCAGGTGTC |
| 7510 | GCAGAGUGUCACAUUAACGCA | 13175 | GCAGAGTGTCACATTAACGCA |
| 7511 | GCAGAGUGUCAGACAGCCUUG | 13176 | GCAGAGTGTCAGACAGCCTTG |
| 7512 | GCAGAUCAUUCUCUGGGACAG | 13177 | GCAGATCATTCTCTGGGACAG |
| 7513 | GCAGAUGUUCACGCCACGUCA | 13178 | GCAGATGTTCACGCCACGTCA |
| 7514 | GCAGCAUGCCGUCCGGGCAGG | 13179 | GCAGCATGCCGTCCGGGCAGG |
| 7515 | GCAGCCAACUUCAUCGCUCAU | 13180 | GCAGCCAACTTCATCGCTCAT |
| 7516 | GCAGCCGCCAUUGCUCAGGGU | 13181 | GCAGCCGCCATTGCTCAGGGT |
| 7517 | GCAGCCGGGAGGUGUCGGGAA | 13182 | GCAGCCGGGAGGTGTCGGGAA |
| 7518 | GCAGCCUCAGCCUCUCUUGGC | 13183 | GCAGCCTCAGCCTCTCTTGGC |
| 7519 | GCAGCCUCAGCCUCUGUGAGG | 13184 | GCAGCCTCAGCCTCTGTGAGG |
| 7520 | GCAGCCUCUGCCAGGCAGUGU | 13185 | GCAGCCTCTGCCAGGCAGTGT |
| 7521 | GCAGCGAAACUCGUCCUGGGA | 13186 | GCAGCGAAACTCGTCCTGGGA |
| 7522 | GCAGCGGUUGACACGGCCCCC | 13187 | GCAGCGGTTGACACGGCCCCC |
| 7523 | GCAGCUCCUCAUGUCCCUGGC | 13188 | GCAGCTCCTCATGTCCCTGGC |
| 7524 | GCAGGAGGCCUCGUCUGAGCC | 13189 | GCAGGAGGCCTCGTCTGAGCC |
| 7525 | GCAGGCAAUGCUUUGGUCUUC | 13190 | GCAGGCAATGCTTTGGTCTTC |
| 7526 | GCAGGCCACGUGUCCUCACGG | 13191 | GCAGGCCACGTGTCCTCACGG |
| 7527 | GCAGGCCCACAGCUGGGGGAU | 13192 | GCAGGCCCACAGCTGGGGGAT |
| 7528 | GCAGGCCUUCGUGUGGGGGUC | 13193 | GCAGGCCTTCGTGTGGGGGTC |
| 7529 | GCAGGCGCAGGUAAACUUGGG | 13194 | GCAGGCGCAGGTAAACTTGGG |
| 7530 | GCAGGGACGGGACUCCAGGCA | 13195 | GCAGGGACGGGACTCCAGGCA |
| 7531 | GCAGGGAGGCACAGAUACUGG | 13196 | GCAGGGAGGCACAGATACTGG |
| 7532 | GCAGGGCCAGGGGGUCCCGUU | 13197 | GCAGGGCCAGGGGGTCCCGTT |
| 7533 | GCAGGGGCUACUGUCCCCUUG | 13198 | GCAGGGGCTACTGTCCCCTTG |
| 7534 | GCAGGUAAACUUGGGCGAGUG | 13199 | GCAGGTAAACTTGGGCGAGTG |
| 7535 | GCAGGUGACAGACAAGCACGU | 13200 | GCAGGTGACAGACAAGCACGT |
| 7536 | GCAGGUGGAGCUGUUGCACUG | 13201 | GCAGGTGGAGCTGTTGCACTG |
| 7537 | GCAGGUGUCGGGAUCCUGACA | 13202 | GCAGGTGTCGGGATCCTGACA |
| 7538 | GCAGUCAUAUUCCCGGUCACA | 13203 | GCAGTCATATTCCCGGTCACA |
| 7539 | GCAGUCCACUUGGCCAUCGCA | 13204 | GCAGTCCACTTGGCCATCGCA |
| 7540 | GCAGUCCCCGCCGCGGCGAGG | 13205 | GCAGTCCCCGCCGCGGCGAGG |
| 7541 | GCAGUCCCGGUCUGAGUCACA | 13206 | GCAGTCCCGGTCTGAGTCACA |
| 7542 | GCAGUCGGGGCCACCAUCACA | 13207 | GCAGTCGGGGCCACCATCACA |
| 7543 | GCAGUCGGGGUCGUUGUCGCA | 13208 | GCAGTCGGGGTCGTTGTCGCA |
| 7544 | GCAGUCUCUAGCCAUGUUGCA | 13209 | GCAGTCTCTAGCCATGTTGCA |
| 7545 | GCAGUGGAACUCGAAGGCCGA | 13210 | GCAGTGGAACTCGAAGGCCGA |
| 7546 | GCAGUGGCAUAAUCAUAGCUC | 13211 | GCAGTGGCATAATCATAGCTC |
| 7547 | GCAGUGGCGCAAUCUCGGCUC | 13212 | GCAGTGGCGCAATCTCGGCTC |
| 7548 | GCAGUGGCUCGAUCAUGGCUC | 13213 | GCAGTGGCTCGATCATGGCTC |
| 7549 | GCAGUGUCCCGACCCGGAUCA | 13214 | GCAGTGTCCCGACCCGGATCA |
| 7550 | GCAGUUCUCGAUAUUCACGAU | 13215 | GCAGTTCTCGATATTCACGAT |
| 7551 | GCAGUUUCCAUCAGAGCACUG | 13216 | GCAGTTTCCATCAGAGCACTG |
| 7552 | GCAGUUUUCCUCGUCAGAUUU | 13217 | GCAGTTTTCCTCGTCAGATTT |
| 7553 | GCAUAAUCAUAGCUCACGACA | 13218 | GCATAATCATAGCTCACGACA |
| 7554 | GCAUAGAAGAGGUAAACACGU | 13219 | GCATAGAAGAGGTAAACACGT |
| 7555 | GCAUAGAAGUGGAAGCACUAG | 13220 | GCATAGAAGTGGAAGCACTAG |
| 7556 | GCAUCAUUUGGUGAAUGAGUU | 13221 | GCATCATTTGGTGAATGAGTT |
| 7557 | GCAUCUGUCGCCCACGUGGCU | 13222 | GCATCTGTCGCCCACGTGGCT |
| 7558 | GCAUCUGUCGCCCACUGCAGU | 13223 | GCATCTGTCGCCCACTGCAGT |
| 7559 | GCAUCUUCGCUGGGCCACCAG | 13224 | GCATCTTCGCTGGGCCACCAG |
| 7560 | GCAUGCCGUCCGGGCAGGCGC | 13225 | GCATGCCGTCCGGGCAGGCGC |
| 7561 | GCAUGGGCACUGUCCGAAGCC | 13226 | GCATGGGCACTGTCCGAAGCC |
| 7562 | GCAUGGUUUUUUUUUGUUUUU | 13227 | GCATGGTTTTTTTTTGTTTTT |
| 7563 | GCAUGUUUUAAACACAUACCC | 13228 | GCATGTTTTAAACACATACCC |
| 7564 | GCAUUCAUUGACACGGGCUUU | 13229 | GCATTCATTGACACGGGCTTT |
| 7565 | GCAUUCGCCGCUGUGACACUU | 13230 | GCATTCGCCGCTGTGACACTT |
| 7566 | GCAUUCGUUGGUCCCGCACUC | 13231 | GCATTCGTTGGTCCCGCACTC |
| 7567 | GCAUUUACGUGCUCCGAAACC | 13232 | GCATTTACGTGCTCCGAAACC |
| 7568 | GCAUUUCAGAGGCAAUAACCC | 13233 | GCATTTCAGAGGCAATAACCC |
| 7569 | GCAUUUCCCGUCUUGGCACUG | 13234 | GCATTTCCCGTCTTGGCACTG |
| 7570 | GCAUUUGCAUAGAAGUGGAAG | 13235 | GCATTTGCATAGAAGTGGAAG |
| 7571 | GCCAAAUGUACACAGUGUACA | 13236 | GCCAAATGTACACAGTGTACA |
| 7572 | GCCAAAUUCAUUUUUUAAGAG | 13237 | GCCAAATTCATTTTTTAAGAG |
| 7573 | GCCAACAAGUUGACAUCGGAA | 13238 | GCCAACAAGTTGACATCGGAA |
| 7574 | GCCAACUUCAUCGCUCAUGUC | 13239 | GCCAACTTCATCGCTCATGTC |
| 7575 | GCCAAGGAGAAGGGGUGGGCC | 13240 | GCCAAGGAGAAGGGGTGGGCC |
| 7576 | GCCAAGGUAACCGGGUGUCUC | 13241 | GCCAAGGTAACCGGGTGTCTC |
| 7577 | GCCAAUCCCUUGUGACAUCUU | 13242 | GCCAATCCCTTGTGACATCTT |
| 7578 | GCCACACCUGGGUGCAGGCCA | 13243 | GCCACACCTGGGTGCAGGCCA |
| 7579 | GCCACAGAGCACAGCGGAAAC | 13244 | GCCACAGAGCACAGCGGAAAC |
| 7580 | GCCACAGCGCAGUUUUCCUCG | 13245 | GCCACAGCGCAGTTTTCCTCG |
| 7581 | GCCACAGGACAGCCUUGCUCG | 13246 | GCCACAGGACAGCCTTGCTCG |
| 7582 | GCCACCACGCCCGGCUAAUUU | 13247 | GCCACCACGCCCGGCTAATTT |
| 7583 | GCCACCACGGAUUCAGCCAGA | 13248 | GCCACCACGGATTCAGCCAGA |
| 7584 | GCCACCAGCUGGAAGCCGUCG | 13249 | GCCACCAGCTGGAAGCCGTCG |
| 7585 | GCCACCAUCACAGCGCCAGCU | 13250 | GCCACCATCACAGCGCCAGCT |
| 7586 | GCCACCCUCCAGGUUCACGCA | 13251 | GCCACCCTCCAGGTTCACGCA |
| 7587 | GCCACCGUACCCAGCUGAUUU | 13252 | GCCACCGTACCCAGCTGATTT |
| 7588 | GCCACCUCCGUGUCCAGAGCG | 13253 | GCCACCTCCGTGTCCAGAGCG |
| 7589 | GCCACGUCAUCCUCCAGACUG | 13254 | GCCACGTCATCCTCCAGACTG |
| 7590 | GCCACGUGUCCUCACGGCCAA | 13255 | GCCACGTGTCCTCACGGCCAA |
| 7591 | GCCACUCAUACAUACAACGGG | 13256 | GCCACTCATACATACAACGGG |
| 7592 | GCCACUCAUCCGAGCCAUCUU | 13257 | GCCACTCATCCGAGCCATCTT |
| 7593 | GCCACUGAAUGUUUUCAGUCA | 13258 | GCCACTGAATGTTTTCAGTCA |
| 7594 | GCCACUGAGGAGAUCUAGGGU | 13259 | GCCACTGAGGAGATCTAGGGT |
| 7595 | GCCACUGCAGCCUCAGCCUCU | 13260 | GCCACTGCAGCCTCAGCCTCT |
| 7596 | GCCACUGCGCCCGGCCUCACC | 13261 | GCCACTGCGCCCGGCCTCACC |
| 7597 | GCCACUUAGGCAGUGGAACUC | 13262 | GCCACTTAGGCAGTGGAACTC |
| 7598 | GCCACUUGCUUCUCUGGGCCU | 13263 | GCCACTTGCTTCTCTGGGCCT |
| 7599 | GCCAGACUGCGGACUGCAGUG | 13264 | GCCAGACTGCGGACTGCAGTG |
| 7600 | GCCAGAGGCCAUGGGCUGCUG | 13265 | GCCAGAGGCCATGGGCTGCTG |
| 7601 | GCCAGAUCAUUUCCGACGCCA | 13266 | GCCAGATCATTTCCGACGCCA |
| 7602 | GCCAGCAACGUCGCCCAGAGC | 13267 | GCCAGCAACGTCGCCCAGAGC |
| 7603 | GCCAGCAGCAUGCCGUCCGGG | 13268 | GCCAGCAGCATGCCGTCCGGG |
| 7604 | GCCAGCCCGUCGGGGGCCUGG | 13269 | GCCAGCCCGTCGGGGGCCTGG |
| 7605 | GCCAGCCUCUUUUCAUCCUCC | 13270 | GCCAGCCTCTTTTCATCCTCC |
| 7606 | GCCAGCUGGAGUGGAUGCACU | 13271 | GCCAGCTGGAGTGGATGCACT |
| 7607 | GCCAGGAGGGCCCAGGAUAAC | 13272 | GCCAGGAGGGCCCAGGATAAC |
| 7608 | GCCAGGAUGGUCUCGAUCUCC | 13273 | GCCAGGATGGTCTCGATCTCC |
| 7609 | GCCAGGCAGUGUCCCGACCCG | 13274 | GCCAGGCAGTGTCCCGACCCG |
| 7610 | GCCAGGGGGUCCCGUUGGUGC | 13275 | GCCAGGGGGTCCCGTTGGTGC |
| 7611 | GCCAGUUCUUCCAUAGAAGGA | 13276 | GCCAGTTCTTCCATAGAAGGA |
| 7612 | GCCAUCCUGGCACUCAGCGCU | 13277 | GCCATCCTGGCACTCAGCGCT |
| 7613 | GCCAUCGCACCUCCAGAACUG | 13278 | GCCATCGCACCTCCAGAACTG |
| 7614 | GCCAUCGCAGACCCACUUGUA | 13279 | GCCATCGCAGACCCACTTGTA |
| 7615 | GCCAUCUGCUGUUGUGUGUUG | 13280 | GCCATCTGCTGTTGTGTGTTG |
| 7616 | GCCAUCUUCGCAGUCGGGGUC | 13281 | GCCATCTTCGCAGTCGGGGTC |
| 7617 | GCCAUGAACAGGAUCCACCAC | 13282 | GCCATGAACAGGATCCACCAC |
| 7618 | GCCAUGAAUCCCUUUCCUGGC | 13283 | GCCATGAATCCCTTTCCTGGC |
| 7619 | GCCAUGCCUGGCCAGAGGCCA | 13284 | GCCATGCCTGGCCAGAGGCCA |
| 7620 | GCCAUGGAUGCAGUUUCCAUC | 13285 | GCCATGGATGCAGTTTCCATC |
| 7621 | GCCAUGGGCUGCUGAUGCACC | 13286 | GCCATGGGCTGCTGATGCACC |
| 7622 | GCCAUGUUGCAGACUUUGUCC | 13287 | GCCATGTTGCAGACTTTGTCC |
| 7623 | GCCAUUGCAUGGGCACUGUCC | 13288 | GCCATTGCATGGGCACTGTCC |
| 7624 | GCCAUUGCUCAGGGUGGUCCU | 13289 | GCCATTGCTCAGGGTGGTCCT |
| 7625 | GCCAUUGGGCCACUGAAUGUU | 13290 | GCCATTGGGCCACTGAATGTT |
| 7626 | GCCCACAGCCUUGCAGGCCUU | 13291 | GCCCACAGCCTTGCAGGCCTT |
| 7627 | GCCCACAGCUGGGGGAUGCAG | 13292 | GCCCACAGCTGGGGGATGCAG |
| 7628 | GCCCACGUGGCUGAAGAUCUC | 13293 | GCCCACGTGGCTGAAGATCTC |
| 7629 | GCCCACUGCAGUCCCCGCCGC | 13294 | GCCCACTGCAGTCCCCGCCGC |
| 7630 | GCCCAGAGCUUGGUGAGACAU | 13295 | GCCCAGAGCTTGGTGAGACAT |
| 7631 | GCCCAGGACAGAGUCGGUCCA | 13296 | GCCCAGGACAGAGTCGGTCCA |
| 7632 | GCCCAGGAUAACGGAGGGCGA | 13297 | GCCCAGGATAACGGAGGGCGA |
| 7633 | GCCCAGGCCAGACUGCGGACU | 13298 | GCCCAGGCCAGACTGCGGACT |
| 7634 | GCCCAGGCUGGAAAGCAGUGG | 13299 | GCCCAGGCTGGAAAGCAGTGG |
| 7635 | GCCCAGGCUGGAGUGCAGUGG | 13300 | GCCCAGGCTGGAGTGCAGTGG |
| 7636 | GCCCAGGGGUGGCCCCAGGCA | 13301 | GCCCAGGGGTGGCCCCAGGCA |
| 7637 | GCCCCAGGCAGCCGGGAGGUG | 13302 | GCCCCAGGCAGCCGGGAGGTG |
| 7638 | GCCCCAGGGCCCCAUGCUCGC | 13303 | GCCCCAGGGCCCCATGCTCGC |
| 7639 | GCCCCAUGCUCGCAGCCUCUG | 13304 | GCCCCATGCTCGCAGCCTCTG |
| 7640 | GCCCCCACAGCUGAAGUCCCC | 13305 | GCCCCCACAGCTGAAGTCCCC |
| 7641 | GCCCCCCAGGACAAGGUGGGG | 13306 | GCCCCCCAGGACAAGGTGGGG |
| 7642 | GCCCCCGAGACCAGAGACCCA | 13307 | GCCCCCGAGACCAGAGACCCA |
| 7643 | GCCCCCGUUGACAUCGAUGCU | 13308 | GCCCCCGTTGACATCGATGCT |
| 7644 | GCCCCCUUUCUUGAUCUUGGC | 13309 | GCCCCCTTTCTTGATCTTGGC |
| 7645 | GCCCCGAGAAUAGUCACUGAA | 13310 | GCCCCGAGAATAGTCACTGAA |
| 7646 | GCCCCUCUCUGUCCCCGGCAU | 13311 | GCCCCTCTCTGTCCCCGGCAT |
| 7647 | GCCCCUCUGUGAACUUGAUCG | 13312 | GCCCCTCTGTGAACTTGATCG |
| 7648 | GCCCGCCACCACGCCCGGCUA | 13313 | GCCCGCCACCACGCCCGGCTA |
| 7649 | GCCCGGCCUCACCGUGCAUGU | 13314 | GCCCGGCCTCACCGTGCATGT |
| 7650 | GCCCGGCUAAUUUUUUGUAUU | 13315 | GCCCGGCTAATTTTTTGTATT |
| 7651 | GCCCGUCGGGGGCCUGGAUGU | 13316 | GCCCGTCGGGGGCCTGGATGT |
| 7652 | GCCCUCACGCUACUGGGCUUC | 13317 | GCCCTCACGCTACTGGGCTTC |
| 7653 | GCCCUUGGCUUGGAGCCGUUC | 13318 | GCCCTTGGCTTGGAGCCGTTC |
| 7654 | GCCCUUGGUAUCCGCAACAGA | 13319 | GCCCTTGGTATCCGCAACAGA |
| 7655 | GCCGAGAGAUGCACUUCCCAU | 13320 | GCCGAGAGATGCACTTCCCAT |
| 7656 | GCCGAGCAGGGGCUACUGUCC | 13321 | GCCGAGCAGGGGCTACTGTCC |
| 7657 | GCCGAUCUUAAGGUCAUUGCA | 13322 | GCCGATCTTAAGGTCATTGCA |
| 7658 | GCCGCCAGUUCUUCCAUAGAA | 13323 | GCCGCCAGTTCTTCCATAGAA |
| 7659 | GCCGCCAUUGCUCAGGGUGGU | 13324 | GCCGCCATTGCTCAGGGTGGT |
| 7660 | GCCGCCGUUGUUGUCCAAGCA | 13325 | GCCGCCGTTGTTGTCCAAGCA |
| 7661 | GCCGCGGCGAGGAGCAAGGCG | 13326 | GCCGCGGCGAGGAGCAAGGCG |
| 7662 | GCCGCUGUGACACUUGAACUU | 13327 | GCCGCTGTGACACTTGAACTT |
| 7663 | GCCGGCGAGGUCUCAGGAAGG | 13328 | GCCGGCGAGGTCTCAGGAAGG |
| 7664 | GCCGGCUGCCAUGGAUGCAGU | 13329 | GCCGGCTGCCATGGATGCAGT |
| 7665 | GCCGGGAGGUGUCGGGAACAG | 13330 | GCCGGGAGGTGTCGGGAACAG |
| 7666 | GCCGGGGGCCCCUCUGUGAAC | 13331 | GCCGGGGGCCCCTCTGTGAAC |
| 7667 | GCCGGUUGGUGAAGAAGAGGU | 13332 | GCCGGTTGGTGAAGAAGAGGT |
| 7668 | GCCGUCCAAGCAGUCCCGGUC | 13333 | GCCGTCCAAGCAGTCCCGGTC |
| 7669 | GCCGUCCGGGCAGGCGCAGGU | 13334 | GCCGTCCGGGCAGGCGCAGGT |
| 7670 | GCCGUCCUGGUUGUGGCAAAU | 13335 | GCCGTCCTGGTTGTGGCAAAT |
| 7671 | GCCGUCGGGGCACAGGCACUC | 13336 | GCCGTCGGGGCACAGGCACTC |
| 7672 | GCCGUGGGCUCUGUCAAGCUG | 13337 | GCCGTGGGCTCTGTCAAGCTG |
| 7673 | GCCGUUCUCCCUGAAUAACGU | 13338 | GCCGTTCTCCCTGAATAACGT |
| 7674 | GCCGUUGUCGCAGUCCACUUG | 13339 | GCCGTTGTCGCAGTCCACTTG |
| 7675 | GCCGUUGUUGUCCAAGCAUUC | 13340 | GCCGTTGTTGTCCAAGCATTC |
| 7676 | GCCUCAAAUGCCUGAGCUCAA | 13341 | GCCTCAAATGCCTGAGCTCAA |
| 7677 | GCCUCACCGUGCAUGUUUUAA | 13342 | GCCTCACCGTGCATGTTTTAA |
| 7678 | GCCUCAGCCUCCCAAGUAGCU | 13343 | GCCTCAGCCTCCCAAGTAGCT |
| 7679 | GCCUCAGCCUCCCGAGUAGCU | 13344 | GCCTCAGCCTCCCGAGTAGCT |
| 7680 | GCCUCAGCCUCUCUUGGCUGG | 13345 | GCCTCAGCCTCTCTTGGCTGG |
| 7681 | GCCUCAGCCUCUGUGAGGCAG | 13346 | GCCTCAGCCTCTGTGAGGCAG |
| 7682 | GCCUCCCAAAGUGCUGGGAUU | 13347 | GCCTCCCAAAGTGCTGGGATT |
| 7683 | GCCUCCCAAGUAGCUGGGAUC | 13348 | GCCTCCCAAGTAGCTGGGATC |
| 7684 | GCCUCCCAGAUGAAUAAAUAU | 13349 | GCCTCCCAGATGAATAAATAT |
| 7685 | GCCUCCCGAGUAGCUGGGACU | 13350 | GCCTCCCGAGTAGCTGGGACT |
| 7686 | GCCUCGCCAUGCCUGGCCAGA | 13351 | GCCTCGCCATGCCTGGCCAGA |
| 7687 | GCCUCGGCCUCCCAAAGUGCU | 13352 | GCCTCGGCCTCCCAAAGTGCT |
| 7688 | GCCUCGUCUGAGCCGUCCAAG | 13353 | GCCTCGTCTGAGCCGTCCAAG |
| 7689 | GCCUCUCUUGGCUGGGUGAGG | 13354 | GCCTCTCTTGGCTGGGTGAGG |
| 7690 | GCCUCUGCCAGGCAGUGUCCC | 13355 | GCCTCTGCCAGGCAGTGTCCC |
| 7691 | GCCUCUGGGAAGUGGCAUCAU | 13356 | GCCTCTGGGAAGTGGCATCAT |
| 7692 | GCCUCUGUGAGGCAGCUCCUC | 13357 | GCCTCTGTGAGGCAGCTCCTC |
| 7693 | GCCUCUUUUCAUCCUCCAAGA | 13358 | GCCTCTTTTCATCCTCCAAGA |
| 7694 | GCCUGACAUCCCCUCCCCUUU | 13359 | GCCTGACATCCCCTCCCCTTT |
| 7695 | GCCUGACGGUGGAUGUCUCCU | 13360 | GCCTGACGGTGGATGTCTCCT |
| 7696 | GCCUGAGCUCAAACCAUCCUC | 13361 | GCCTGAGCTCAAACCATCCTC |
| 7697 | GCCUGGAUGUCUCUGCUGAUG | 13362 | GCCTGGATGTCTCTGCTGATG |
| 7698 | GCCUGGCCAGAGGCCAUGGGC | 13363 | GCCTGGCCAGAGGCCATGGGC |
| 7699 | GCCUGGGAUCCCAUCCCAACA | 13364 | GCCTGGGATCCCATCCCAACA |
| 7700 | GCCUGGUCUCCAACUCCUGAA | 13365 | GCCTGGTCTCCAACTCCTGAA |
| 7701 | GCCUGUUCUGCCUCCCAGAUG | 13366 | GCCTGTTCTGCCTCCCAGATG |
| 7702 | GCCUGUUUCUCUUAUCCUUCA | 13367 | GCCTGTTTCTCTTATCCTTCA |
| 7703 | GCCUUCCUCACACUGGCACUU | 13368 | GCCTTCCTCACACTGGCACTT |
| 7704 | GCCUUCGUGUGGGGGUCCAGC | 13369 | GCCTTCGTGTGGGGGTCCAGC |
| 7705 | GCCUUGAGGGUGGCCGGGGGC | 13370 | GCCTTGAGGGTGGCCGGGGGC |
| 7706 | GCCUUGCAGGCCUUCGUGUGG | 13371 | GCCTTGCAGGCCTTCGTGTGG |
| 7707 | GCCUUGCUCGUCUGAGCCGUU | 13372 | GCCTTGCTCGTCTGAGCCGTT |
| 7708 | GCCUUUGUGACAGGAACCGCG | 13373 | GCCTTTGTGACAGGAACCGCG |
| 7709 | GCGAAACUCGUCCUGGGAGCA | 13374 | GCGAAACTCGTCCTGGGAGCA |
| 7710 | GCGACAGGUGGCCACAGCGCA | 13375 | GCGACAGGTGGCCACAGCGCA |
| 7711 | GCGACAGGUGGCCACAGGACA | 13376 | GCGACAGGTGGCCACAGGACA |
| 7712 | GCGACCACGUUCCUCAGGUUG | 13377 | GCGACCACGTTCCTCAGGTTG |
| 7713 | GCGACGGUCCAGCGCAAUUUC | 13378 | GCGACGGTCCAGCGCAATTTC |
| 7714 | GCGACUCGUGUAUGUCGCGGA | 13379 | GCGACTCGTGTATGTCGCGGA |
| 7715 | GCGAGGAGCAAGGCGACGGUC | 13380 | GCGAGGAGCAAGGCGACGGTC |
| 7716 | GCGAGGGCGCCCCCCAGGACA | 13381 | GCGAGGGCGCCCCCCAGGACA |
| 7717 | GCGAGGUCUCAGGAAGGGUUC | 13382 | GCGAGGTCTCAGGAAGGGTTC |
| 7718 | GCGAGUAGAUGUCCACACCAU | 13383 | GCGAGTAGATGTCCACACCAT |
| 7719 | GCGAGUGGGGGUUGAUCUGCG | 13384 | GCGAGTGGGGGTTGATCTGCG |
| 7720 | GCGAUCCUCCUGCCUCAGCCU | 13385 | GCGATCCTCCTGCCTCAGCCT |
| 7721 | GCGAUGGAGCCCACAGCCUUG | 13386 | GCGATGGAGCCCACAGCCTTG |
| 7722 | GCGAUGGGGAGGACAAUGGAC | 13387 | GCGATGGGGAGGACAATGGAC |
| 7723 | GCGAUUUCAGAAAGAACCUGA | 13388 | GCGATTTCAGAAAGAACCTGA |
| 7724 | GCGCAAUCUCGGCUCACUGCA | 13389 | GCGCAATCTCGGCTCACTGCA |
| 7725 | GCGCAAUUUCCAGCCCCAGGG | 13390 | GCGCAATTTCCAGCCCCAGGG |
| 7726 | GCGCAGGUAAACUUGGGCGAG | 13391 | GCGCAGGTAAACTTGGGCGAG |
| 7727 | GCGCAGUUUUCCUCGUCAGAU | 13392 | GCGCAGTTTTCCTCGTCAGAT |
| 7728 | GCGCCAGCUGGAGUGGAUGCA | 13393 | GCGCCAGCTGGAGTGGATGCA |
| 7729 | GCGCCCCCCAGGACAAGGUGG | 13394 | GCGCCCCCCAGGACAAGGTGG |
| 7730 | GCGCCCGGCCUCACCGUGCAU | 13395 | GCGCCCGGCCTCACCGTGCAT |
| 7731 | GCGCUGCCAUCGCAGACCCAC | 13396 | GCGCTGCCATCGCAGACCCAC |
| 7732 | GCGCUGCGGCCACUCAUCCGA | 13397 | GCGCTGCGGCCACTCATCCGA |
| 7733 | GCGGAAACCGGGGACUUCGCC | 13398 | GCGGAAACCGGGGACTTCGCC |
| 7734 | GCGGACAUAAAGACGACAAUG | 13399 | GCGGACATAAAGACGACAATG |
| 7735 | GCGGACUGCAGUGGCGCAAUC | 13400 | GCGGACTGCAGTGGCGCAATC |
| 7736 | GCGGAGGAACGCCAGGCCUCC | 13401 | GCGGAGGAACGCCAGGCCTCC |
| 7737 | GCGGAGGCGGCUCCGGGGACC | 13402 | GCGGAGGCGGCTCCGGGGACC |
| 7738 | GCGGCCACUCAUCCGAGCCAU | 13403 | GCGGCCACTCATCCGAGCCAT |
| 7739 | GCGGCCACUGAGGAGAUCUAG | 13404 | GCGGCCACTGAGGAGATCTAG |
| 7740 | GCGGCGAGGAGCAAGGCGACG | 13405 | GCGGCGAGGAGCAAGGCGACG |
| 7741 | GCGGCUCCGGGGACCCGGGAC | 13406 | GCGGCTCCGGGGACCCGGGAC |
| 7742 | GCGGGACCACAGGUGAGCACC | 13407 | GCGGGACCACAGGTGAGCACC |
| 7743 | GCGGGAGUCUGACGGAGGCUG | 13408 | GCGGGAGTCTGACGGAGGCTG |
| 7744 | GCGGGAGUUCCCCAGUCAGUC | 13409 | GCGGGAGTTCCCCAGTCAGTC |
| 7745 | GCGGGGAGAUUCUGAGGCAAC | 13410 | GCGGGGAGATTCTGAGGCAAC |
| 7746 | GCGGGGCAGGGAGGCACAGAU | 13411 | GCGGGGCAGGGAGGCACAGAT |
| 7747 | GCGGUUGACACGGCCCCCACA | 13412 | GCGGTTGACACGGCCCCCACA |
| 7748 | GCGGUUGGCACUGAAAAUGGC | 13413 | GCGGTTGGCACTGAAAATGGC |
| 7749 | GCGUCAUCUUCCUGACCUCGU | 13414 | GCGTCATCTTCCTGACCTCGT |
| 7750 | GCGUGAGCCACUGCGCCCGGC | 13415 | GCGTGAGCCACTGCGCCCGGC |
| 7751 | GCGUGAGGCACCUGUGUCUGG | 13416 | GCGTGAGGCACCTGTGTCTGG |
| 7752 | GCGUUGCACACAGUCCAGUUC | 13417 | GCGTTGCACACAGTCCAGTTC |
| 7753 | GCUAACCUGGCUGUCUAGCAA | 13418 | GCTAACCTGGCTGTCTAGCAA |
| 7754 | GCUAAUUUUUUGUAUUUUUAG | 13419 | GCTAATTTTTTGTATTTTTAG |
| 7755 | GCUACAAAAACCUUCUAUACA | 13420 | GCTACAAAAACCTTCTATACA |
| 7756 | GCUACUGGGCUUCUUCUCAUU | 13421 | GCTACTGGGCTTCTTCTCATT |
| 7757 | GCUACUGUCCCCUUGGAACAC | 13422 | GCTACTGTCCCCTTGGAACAC |
| 7758 | GCUCAAACCAUCCUCCCACCU | 13423 | GCTCAAACCATCCTCCCACCT |
| 7759 | GCUCACGACAGCCUCAAAUGC | 13424 | GCTCACGACAGCCTCAAATGC |
| 7760 | GCUCACUGCAACCUCCACCUC | 13425 | GCTCACTGCAACCTCCACCTC |
| 7761 | GCUCACUGCAAGCUCCGCUUC | 13426 | GCTCACTGCAAGCTCCGCTTC |
| 7762 | GCUCAGCCUCCCAAAGUGCUG | 13427 | GCTCAGCCTCCCAAAGTGCTG |
| 7763 | GCUCAGGCCUGGUCUCCAACU | 13428 | GCTCAGGCCTGGTCTCCAACT |
| 7764 | GCUCAGGCGAUCCUCCUGCCU | 13429 | GCTCAGGCGATCCTCCTGCCT |
| 7765 | GCUCAGGGUGGUCCUCUCACA | 13430 | GCTCAGGGTGGTCCTCTCACA |
| 7766 | GCUCAUGUCCUUGCAGUCAUA | 13431 | GCTCATGTCCTTGCAGTCATA |
| 7767 | GCUCCGAAACCAGAAAGGCUU | 13432 | GCTCCGAAACCAGAAAGGCTT |
| 7768 | GCUCCGCUUCCCGGGUUCACA | 13433 | GCTCCGCTTCCCGGGTTCACA |
| 7769 | GCUCCGGGGACCCGGGACUUG | 13434 | GCTCCGGGGACCCGGGACTTG |
| 7770 | GCUCCGGUCCAGCGUCAUCUU | 13435 | GCTCCGGTCCAGCGTCATCTT |
| 7771 | GCUCCGUGGCGAUGGGGAGGA | 13436 | GCTCCGTGGCGATGGGGAGGA |
| 7772 | GCUCCUCAUGUCCCUGGCCAG | 13437 | GCTCCTCATGTCCCTGGCCAG |
| 7773 | GCUCGAUCAUGGCUCACUGCA | 13438 | GCTCGATCATGGCTCACTGCA |
| 7774 | GCUCGCAGCCUCUGCCAGGCA | 13439 | GCTCGCAGCCTCTGCCAGGCA |
| 7775 | GCUCGUCUGAGCCGUUGUCGC | 13440 | GCTCGTCTGAGCCGTTGTCGC |
| 7776 | GCUCUGCCUCUGGGAAGUGGC | 13441 | GCTCTGCCTCTGGGAAGTGGC |
| 7777 | GCUCUGGCAGGCAAUGCUUUG | 13442 | GCTCTGGCAGGCAATGCTTTG |
| 7778 | GCUCUGUCAAGCUGGGUGCUG | 13443 | GCTCTGTCAAGCTGGGTGCTG |
| 7779 | GCUCUGUCACACAGCUGCCCC | 13444 | GCTCTGTCACACAGCTGCCCC |
| 7780 | GCUCUGUCGCCCAGGCCAGAC | 13445 | GCTCTGTCGCCCAGGCCAGAC |
| 7781 | GCUGAAGAUCUCGGCUGCAGA | 13446 | GCTGAAGATCTCGGCTGCAGA |
| 7782 | GCUGAAGUCCCCGGAUUUGCA | 13447 | GCTGAAGTCCCCGGATTTGCA |
| 7783 | GCUGACCUUUAGCCUGACGGU | 13448 | GCTGACCTTTAGCCTGACGGT |
| 7784 | GCUGAUGACGGUGUCAUAGGA | 13449 | GCTGATGACGGTGTCATAGGA |
| 7785 | GCUGAUGCACCAUGCAUGGUU | 13450 | GCTGATGCACCATGCATGGTT |
| 7786 | GCUGAUUUUUAACUUUUUGGU | 13451 | GCTGATTTTTAACTTTTTGGT |
| 7787 | GCUGCAGACCAAGGAGGGGCG | 13452 | GCTGCAGACCAAGGAGGGGCG |
| 7788 | GCUGCAGAUCAUUCUCUGGGA | 13453 | GCTGCAGATCATTCTCTGGGA |
| 7789 | GCUGCAGGUGUCGGGAUCCUG | 13454 | GCTGCAGGTGTCGGGATCCTG |
| 7790 | GCUGCCAUCGCAGACCCACUU | 13455 | GCTGCCATCGCAGACCCACTT |
| 7791 | GCUGCCAUGGAUGCAGUUUCC | 13456 | GCTGCCATGGATGCAGTTTCC |
| 7792 | GCUGCCCCCGAGACCAGAGAC | 13457 | GCTGCCCCCGAGACCAGAGAC |
| 7793 | GCUGCGGCCACUCAUCCGAGC | 13458 | GCTGCGGCCACTCATCCGAGC |
| 7794 | GCUGCUGAUGCACCAUGCAUG | 13459 | GCTGCTGATGCACCATGCATG |
| 7795 | GCUGGAAACCCUGGCUUCCCG | 13460 | GCTGGAAACCCTGGCTTCCCG |
| 7796 | GCUGGAAAGCAGUGGCAUAAU | 13461 | GCTGGAAAGCAGTGGCATAAT |
| 7797 | GCUGGAAGCCGUCGGGGCACA | 13462 | GCTGGAAGCCGTCGGGGCACA |
| 7798 | GCUGGAAGCCUUCCUCACACU | 13463 | GCTGGAAGCCTTCCTCACACT |
| 7799 | GCUGGAGUGCAGUGGCUCGAU | 13464 | GCTGGAGTGCAGTGGCTCGAT |
| 7800 | GCUGGAGUGGAUGCACUCGCC | 13465 | GCTGGAGTGGATGCACTCGCC |
| 7801 | GCUGGCCACCUCCGUGUCCAG | 13466 | GCTGGCCACCTCCGTGTCCAG |
| 7802 | GCUGGCGGGACCACAGGUGAG | 13467 | GCTGGCGGGACCACAGGTGAG |
| 7803 | GCUGGCUGCAGGUGUCGGGAU | 13468 | GCTGGCTGCAGGTGTCGGGAT |
| 7804 | GCUGGGACUACAGGUGCCCGC | 13469 | GCTGGGACTACAGGTGCCCGC |
| 7805 | GCUGGGAUCACAGGCACGUGC | 13470 | GCTGGGATCACAGGCACGTGC |
| 7806 | GCUGGGAUUACAGGCGUGAGC | 13471 | GCTGGGATTACAGGCGTGAGC |
| 7807 | GCUGGGAUUACAGGCGUGAGG | 13472 | GCTGGGATTACAGGCGTGAGG |
| 7808 | GCUGGGCCACCAGCUGGAAGC | 13473 | GCTGGGCCACCAGCTGGAAGC |
| 7809 | GCUGGGGGAUGCAGGUGGAGC | 13474 | GCTGGGGGATGCAGGTGGAGC |
| 7810 | GCUGGGUGAGGUUGUGGAAGA | 13475 | GCTGGGTGAGGTTGTGGAAGA |
| 7811 | GCUGGGUGCUGCAGAUCAUUC | 13476 | GCTGGGTGCTGCAGATCATTC |
| 7812 | GCUGGUGGGGCGAGGGCGCCC | 13477 | GCTGGTGGGGCGAGGGCGCCC |
| 7813 | GCUGGUGUACUCGCUCCGGUC | 13478 | GCTGGTGTACTCGCTCCGGTC |
| 7814 | GCUGGUGUCCUGACAGCCACA | 13479 | GCTGGTGTCCTGACAGCCACA |
| 7815 | GCUGUAGCCGUCCUGGUUGUG | 13480 | GCTGTAGCCGTCCTGGTTGTG |
| 7816 | GCUGUCACUGUCUCUCCGGAC | 13481 | GCTGTCACTGTCTCTCCGGAC |
| 7817 | GCUGUCUAGCAAGGCUUGCAU | 13482 | GCTGTCTAGCAAGGCTTGCAT |
| 7818 | GCUGUGACACUUGAACUUGUU | 13483 | GCTGTGACACTTGAACTTGTT |
| 7819 | GCUGUGGAGCUGACCUUUAGC | 13484 | GCTGTGGAGCTGACCTTTAGC |
| 7820 | GCUGUGGAUCCAGUCCACAGC | 13485 | GCTGTGGATCCAGTCCACAGC |
| 7821 | GCUGUGUCCUAGCUGGAAACC | 13486 | GCTGTGTCCTAGCTGGAAACC |
| 7822 | GCUGUGUCCUUACGGCUGUGG | 13487 | GCTGTGTCCTTACGGCTGTGG |
| 7823 | GCUGUUGAUGUUCUUAAGCCG | 13488 | GCTGTTGATGTTCTTAAGCCG |
| 7824 | GCUGUUGCACUGGAAGCUGGC | 13489 | GCTGTTGCACTGGAAGCTGGC |
| 7825 | GCUGUUGUGUGUUGAAAGCCA | 13490 | GCTGTTGTGTGTTGAAAGCCA |
| 7826 | GCUUAAGGAAGGUACAAACCC | 13491 | GCTTAAGGAAGGTACAAACCC |
| 7827 | GCUUAGAGAUUGGUGGAUGAG | 13492 | GCTTAGAGATTGGTGGATGAG |
| 7828 | GCUUAUCACGGUUCCCUGCAC | 13493 | GCTTATCACGGTTCCCTGCAC |
| 7829 | GCUUCCCGGGUUCACACCAUU | 13494 | GCTTCCCGGGTTCACACCATT |
| 7830 | GCUUCGUUGAUGAUAUCUGUC | 13495 | GCTTCGTTGATGATATCTGTC |
| 7831 | GCUUCUCUGGGCCUGACAUCC | 13496 | GCTTCTCTGGGCCTGACATCC |
| 7832 | GCUUCUUCUCAUUUCCUCUGC | 13497 | GCTTCTTCTCATTTCCTCTGC |
| 7833 | GCUUGAGAUGGAGUGAAGUUU | 13498 | GCTTGAGATGGAGTGAAGTTT |
| 7834 | GCUUGCAUAGAAGAGGUAAAC | 13499 | GCTTGCATAGAAGAGGTAAAC |
| 7835 | GCUUGGAGCCGUUCUCCCUGA | 13500 | GCTTGGAGCCGTTCTCCCTGA |
| 7836 | GCUUGGAGGCAUUUGCAUAGA | 13501 | GCTTGGAGGCATTTGCATAGA |
| 7837 | GCUUGGUGAGACAUUGUCACU | 13502 | GCTTGGTGAGACATTGTCACT |
| 7838 | GCUUUCCCUGGCCUGGGAUCC | 13503 | GCTTTCCCTGGCCTGGGATCC |
| 7839 | GCUUUGAAGUCCCGGUCAACC | 13504 | GCTTTGAAGTCCCGGTCAACC |
| 7840 | GCUUUGGUCUUCUCUGUCUUU | 13505 | GCTTTGGTCTTCTCTGTCTTT |
| 7841 | GCUUUGUUGCUCAGGCCUGGU | 13506 | GCTTTGTTGCTCAGGCCTGGT |
| 7842 | GGAAACCCUGGCUUCCCGCGA | 13507 | GGAAACCCTGGCTTCCCGCGA |
| 7843 | GGAAACCGGGGACUUCGCCAG | 13508 | GGAAACCGGGGACTTCGCCAG |
| 7844 | GGAAAGCAGUGGCAUAAUCAU | 13509 | GGAAAGCAGTGGCATAATCAT |
| 7845 | GGAAAGGAAGAAACCAAAAUC | 13510 | GGAAAGGAAGAAACCAAAATC |
| 7846 | GGAACACGUAAAGACCCCUAC | 13511 | GGAACACGTAAAGACCCCTAC |
| 7847 | GGAACAGCCGCCGUUGUUGUC | 13512 | GGAACAGCCGCCGTTGTTGTC |
| 7848 | GGAACAGGUCGGGUGGUUGUG | 13513 | GGAACAGGTCGGGTGGTTGTG |
| 7849 | GGAACCGAGGCCUUGAGGGUG | 13514 | GGAACCGAGGCCTTGAGGGTG |
| 7850 | GGAACCGCGGAGGAACGCCAG | 13515 | GGAACCGCGGAGGAACGCCAG |
| 7851 | GGAACCUGUGAGGCGGUUGGC | 13516 | GGAACCTGTGAGGCGGTTGGC |
| 7852 | GGAACUCGAAGGCCGAGCAGG | 13517 | GGAACTCGAAGGCCGAGCAGG |
| 7853 | GGAACUCGUUUCUUUCGCAUC | 13518 | GGAACTCGTTTCTTTCGCATC |
| 7854 | GGAAGAAACCAAAAUCCCAAC | 13519 | GGAAGAAACCAAAATCCCAAC |
| 7855 | GGAAGACCCCCAGGCAAAGGA | 13520 | GGAAGACCCCCAGGCAAAGGA |
| 7856 | GGAAGACGAGGAGCACGAUGG | 13521 | GGAAGACGAGGAGCACGATGG |
| 7857 | GGAAGACGAGGAGCACUGUAG | 13522 | GGAAGACGAGGAGCACTGTAG |
| 7858 | GGAAGAGAACCAUAUCCUCUG | 13523 | GGAAGAGAACCATATCCTCTG |
| 7859 | GGAAGAGACGCCGUGGGCUCU | 13524 | GGAAGAGACGCCGTGGGCTCT |
| 7860 | GGAAGCACUAGGUGGGCGGAC | 13525 | GGAAGCACTAGGTGGGCGGAC |
| 7861 | GGAAGCCGUCGGGGCACAGGC | 13526 | GGAAGCCGTCGGGGCACAGGC |
| 7862 | GGAAGCCUUCCUCACACUGGC | 13527 | GGAAGCCTTCCTCACACTGGC |
| 7863 | GGAAGCUGGCGGGACCACAGG | 13528 | GGAAGCTGGCGGGACCACAGG |
| 7864 | GGAAGGGUUCUGGGCAGGGAC | 13529 | GGAAGGGTTCTGGGCAGGGAC |
| 7865 | GGAAGGUACAAACCCACCUCG | 13530 | GGAAGGTACAAACCCACCTCG |
| 7866 | GGAAGUGAAUGGCUUGGAGGC | 13531 | GGAAGTGAATGGCTTGGAGGC |
| 7867 | GGAAGUGGCAUCAUUUGGUGA | 13532 | GGAAGTGGCATCATTTGGTGA |
| 7868 | GGAAGUGGGUAGGGGUCGGGA | 13533 | GGAAGTGGGTAGGGGTCGGGA |
| 7869 | GGAAUGCAGCGGUUGACACGG | 13534 | GGAATGCAGCGGTTGACACGG |
| 7870 | GGAAUGGAAGUGGGUAGGGGU | 13535 | GGAATGGAAGTGGGTAGGGGT |
| 7871 | GGAAUUCGUCAGGGCGACAGG | 13536 | GGAATTCGTCAGGGCGACAGG |
| 7872 | GGACAAGGUGGGGACGGAGGU | 13537 | GGACAAGGTGGGGACGGAGGT |
| 7873 | GGACAAUGGACAGAGCCCUCA | 13538 | GGACAATGGACAGAGCCCTCA |
| 7874 | GGACAAUUGCCAAUCCCUUGU | 13539 | GGACAATTGCCAATCCCTTGT |
| 7875 | GGACACAGUGUUUUGUCCCUG | 13540 | GGACACAGTGTTTTGTCCCTG |
| 7876 | GGACAGAGCCCUCACGCUACU | 13541 | GGACAGAGCCCTCACGCTACT |
| 7877 | GGACAGAGUCGGUCCAGUAGA | 13542 | GGACAGAGTCGGTCCAGTAGA |
| 7878 | GGACAGCCUUGCUCGUCUGAG | 13543 | GGACAGCCTTGCTCGTCTGAG |
| 7879 | GGACAGGUCAGACCAGUAGAU | 13544 | GGACAGGTCAGACCAGTAGAT |
| 7880 | GGACAGUAGGUUUUCAGCCAA | 13545 | GGACAGTAGGTTTTCAGCCAA |
| 7881 | GGACAUAAAGACGACAAUGGC | 13546 | GGACATAAAGACGACAATGGC |
| 7882 | GGACAUCAGUGCAACAGUAAC | 13547 | GGACATCAGTGCAACAGTAAC |
| 7883 | GGACAUCAUUCUCCCAAAAAG | 13548 | GGACATCATTCTCCCAAAAAG |
| 7884 | GGACCACAGGUGAGCACCGGG | 13549 | GGACCACAGGTGAGCACCGGG |
| 7885 | GGACCCGGGACUUGUCGUCGC | 13550 | GGACCCGGGACTTGTCGTCGC |
| 7886 | GGACCUCAUCCUCUGUGGUCU | 13551 | GGACCTCATCCTCTGTGGTCT |
| 7887 | GGACGCAUUUACGUGCUCCGA | 13552 | GGACGCATTTACGTGCTCCGA |
| 7888 | GGACGGAGGUGUCGCCACAGA | 13553 | GGACGGAGGTGTCGCCACAGA |
| 7889 | GGACGGGACUCCAGGCAGAUG | 13554 | GGACGGGACTCCAGGCAGATG |
| 7890 | GGACUACAGGUGCCCGCCACC | 13555 | GGACTACAGGTGCCCGCCACC |
| 7891 | GGACUCAUCAGAGCCAUCCUG | 13556 | GGACTCATCAGAGCCATCCTG |
| 7892 | GGACUCCAGGCAGAUGUUCAC | 13557 | GGACTCCAGGCAGATGTTCAC |
| 7893 | GGACUGCAGUGGCGCAAUCUC | 13558 | GGACTGCAGTGGCGCAATCTC |
| 7894 | GGACUUCGCCAGGAGGGCCCA | 13559 | GGACTTCGCCAGGAGGGCCCA |
| 7895 | GGACUUGUCGUCGCCUUUGUG | 13560 | GGACTTGTCGTCGCCTTTGTG |
| 7896 | GGAGAAGGGGUGGGCCAGCCU | 13561 | GGAGAAGGGGTGGGCCAGCCT |
| 7897 | GGAGACCACGGGAAUGGAAGU | 13562 | GGAGACCACGGGAATGGAAGT |
| 7898 | GGAGAGAAACUCAAAACUUCC | 13563 | GGAGAGAAACTCAAAACTTCC |
| 7899 | GGAGAGAAAUGGAGGUGUCAU | 13564 | GGAGAGAAATGGAGGTGTCAT |
| 7900 | GGAGAGGCACGCUCUGUCACA | 13565 | GGAGAGGCACGCTCTGTCACA |
| 7901 | GGAGAUCUAGGGUGAUGCCAU | 13566 | GGAGATCTAGGGTGATGCCAT |
| 7902 | GGAGAUGCAUUUCCCGUCUUG | 13567 | GGAGATGCATTTCCCGTCTTG |
| 7903 | GGAGAUUCUGAGGCAACGUUU | 13568 | GGAGATTCTGAGGCAACGTTT |
| 7904 | GGAGCAAGGCGACGGUCCAGC | 13569 | GGAGCAAGGCGACGGTCCAGC |
| 7905 | GGAGCACGAUGGGGAGGACAA | 13570 | GGAGCACGATGGGGAGGACAA |
| 7906 | GGAGCACGUCUCCUGGGACUC | 13571 | GGAGCACGTCTCCTGGGACTC |
| 7907 | GGAGCACGUCUUGGGGGAGCA | 13572 | GGAGCACGTCTTGGGGGAGCA |
| 7908 | GGAGCACGUCUUGGGGGGACA | 13573 | GGAGCACGTCTTGGGGGGACA |
| 7909 | GGAGCACUGUAGGGAGAGGCA | 13574 | GGAGCACTGTAGGGAGAGGCA |
| 7910 | GGAGCCCACAGCCUUGCAGGC | 13575 | GGAGCCCACAGCCTTGCAGGC |
| 7911 | GGAGCCGUUCUCCCUGAAUAA | 13576 | GGAGCCGTTCTCCCTGAATAA |
| 7912 | GGAGCUGACCUUUAGCCUGAC | 13577 | GGAGCTGACCTTTAGCCTGAC |
| 7913 | GGAGCUGUUGCACUGGAAGCU | 13578 | GGAGCTGTTGCACTGGAAGCT |
| 7914 | GGAGGAACGCCAGGCCUCCCC | 13579 | GGAGGAACGCCAGGCCTCCCC |
| 7915 | GGAGGACAAUGGACAGAGCCC | 13580 | GGAGGACAATGGACAGAGCCC |
| 7916 | GGAGGAUGGGCACCAGGCUGG | 13581 | GGAGGATGGGCACCAGGCTGG |
| 7917 | GGAGGAUUUAUUUAUUUUUUU | 13582 | GGAGGATTTATTTATTTTTTT |
| 7918 | GGAGGCACAGAUACUGGCAGC | 13583 | GGAGGCACAGATACTGGCAGC |
| 7919 | GGAGGCAUUUGCAUAGAAGUG | 13584 | GGAGGCATTTGCATAGAAGTG |
| 7920 | GGAGGCCUCGUCUGAGCCGUC | 13585 | GGAGGCCTCGTCTGAGCCGTC |
| 7921 | GGAGGCGGCUCCGGGGACCCG | 13586 | GGAGGCGGCTCCGGGGACCCG |
| 7922 | GGAGGCUGUCACUGUCUCUCC | 13587 | GGAGGCTGTCACTGTCTCTCC |
| 7923 | GGAGGGCCCAGGAUAACGGAG | 13588 | GGAGGGCCCAGGATAACGGAG |
| 7924 | GGAGGGCGACUCGUGUAUGUC | 13589 | GGAGGGCGACTCGTGTATGTC |
| 7925 | GGAGGGGCGGGGAGAUUCUGA | 13590 | GGAGGGGGGGGGAGATTCTGA |
| 7926 | GGAGGUGUCAUCCUGGUCCCC | 13591 | GGAGGTGTCATCCTGGTCCCC |
| 7927 | GGAGGUGUCGCCACAGAGCAC | 13592 | GGAGGTGTCGCCACAGAGCAC |
| 7928 | GGAGGUGUCGGGAACAGGUCG | 13593 | GGAGGTGTCGGGAACAGGTCG |
| 7929 | GGAGUCAACCCAGUAGAGGCG | 13594 | GGAGTCAACCCAGTAGAGGCG |
| 7930 | GGAGUCUCGCUCUGUCGCCCA | 13595 | GGAGTCTCGCTCTGTCGCCCA |
| 7931 | GGAGUCUGACGGAGGCUGUCA | 13596 | GGAGTCTGACGGAGGCTGTCA |
| 7932 | GGAGUGAAGUUUGGAGUCAAC | 13597 | GGAGTGAAGTTTGGAGTCAAC |
| 7933 | GGAGUGCAGUGGCUCGAUCAU | 13598 | GGAGTGCAGTGGCTCGATCAT |
| 7934 | GGAGUGGAUGCACUCGCCACU | 13599 | GGAGTGGATGCACTCGCCACT |
| 7935 | GGAGUUCCCCAGUCAGUCCAG | 13600 | GGAGTTCCCCAGTCAGTCCAG |
| 7936 | GGAUAACGGAGGGCGACUCGU | 13601 | GGATAACGGAGGGCGACTCGT |
| 7937 | GGAUCACAGGCACGUGCCACC | 13602 | GGATCACAGGCACGTGCCACC |
| 7938 | GGAUCACGACCUGCUGUGUCC | 13603 | GGATCACGACCTGCTGTGTCC |
| 7939 | GGAUCCACCACGAUGGCCCUU | 13604 | GGATCCACCACGATGGCCCTT |
| 7940 | GGAUCCAGUCCACAGCCAGCC | 13605 | GGATCCAGTCCACAGCCAGCC |
| 7941 | GGAUCCCAUCCCAACACACAC | 13606 | GGATCCCATCCCAACACACAC |
| 7942 | GGAUCCUGACACUCAUCGAUA | 13607 | GGATCCTGACACTCATCGATA |
| 7943 | GGAUCUCGCUUUGUUGCUCAG | 13608 | GGATCTCGCTTTGTTGCTCAG |
| 7944 | GGAUGAGGCAGGGCCAGGGGG | 13609 | GGATGAGGCAGGGCCAGGGGG |
| 7945 | GGAUGAGGCUGGUGUACUCGC | 13610 | GGATGAGGCTGGTGTACTCGC |
| 7946 | GGAUGCACUCGCCACUUAGGC | 13611 | GGATGCACTCGCCACTTAGGC |
| 7947 | GGAUGCAGGUGGAGCUGUUGC | 13612 | GGATGCAGGTGGAGCTGTTGC |
| 7948 | GGAUGCAGUUUCCAUCAGAGC | 13613 | GGATGCAGTTTCCATCAGAGC |
| 7949 | GGAUGGGCACCAGGCUGGUGU | 13614 | GGATGGGCACCAGGCTGGTGT |
| 7950 | GGAUGGUCUCGAUCUCCUGAC | 13615 | GGATGGTCTCGATCTCCTGAC |
| 7951 | GGAUGUCUCCUGGGUGGCCAC | 13616 | GGATGTCTCCTGGGTGGCCAC |
| 7952 | GGAUGUCUCUGCUGAUGACGG | 13617 | GGATGTCTCTGCTGATGACGG |
| 7953 | GGAUUACAGGCGUGAGCCACU | 13618 | GGATTACAGGCGTGAGCCACT |
| 7954 | GGAUUACAGGCGUGAGGCACC | 13619 | GGATTACAGGCGTGAGGCACC |
| 7955 | GGAUUCAGCCAGAUCAUUUCC | 13620 | GGATTCAGCCAGATCATTTCC |
| 7956 | GGAUUGUGUCACGGUGGAGAG | 13621 | GGATTGTGTCACGGTGGAGAG |
| 7957 | GGAUUUAUUUAUUUUUUUAUA | 13622 | GGATTTATTTATTTTTTTATA |
| 7958 | GGAUUUGCAGGUGACAGACAA | 13623 | GGATTTGCAGGTGACAGACAA |
| 7959 | GGCAAAGGAAGACGAGGAGCA | 13624 | GGCAAAGGAAGACGAGGAGCA |
| 7960 | GGCAAAGGCUAACCUGGCUGU | 13625 | GGCAAAGGCTAACCTGGCTGT |
| 7961 | GGCAAAUGUGGACCUCAUCCU | 13626 | GGCAAATGTGGACCTCATCCT |
| 7962 | GGCAACGUUUCAACCUCGUAA | 13627 | GGCAACGTTTCAACCTCGTAA |
| 7963 | GGCAAUAACCCCCUACACAGG | 13628 | GGCAATAACCCCCTACACAGG |
| 7964 | GGCAAUGCUUUGGUCUUCUCU | 13629 | GGCAATGCTTTGGTCTTCTCT |
| 7965 | GGCACAGAUACUGGCAGCCGC | 13630 | GGCACAGATACTGGCAGCCGC |
| 7966 | GGCACAGGCACUCGUAGCCGA | 13631 | GGCACAGGCACTCGTAGCCGA |
| 7967 | GGCACCAGGCUGGUGUCCUGA | 13632 | GGCACCAGGCTGGTGTCCTGA |
| 7968 | GGCACCUGUGUCUGGCCAAAU | 13633 | GGCACCTGTGTCTGGCCAAAT |
| 7969 | GGCACGCUCUGUCACACAGCU | 13634 | GGCACGCTCTGTCACACAGCT |
| 7970 | GGCACGUGCCACCGUACCCAG | 13635 | GGCACGTGCCACCGTACCCAG |
| 7971 | GGCACUCAGCGCUGCCAUCGC | 13636 | GGCACTCAGCGCTGCCATCGC |
| 7972 | GGCACUCGUAGCCGAUCUUAA | 13637 | GGCACTCGTAGCCGATCTTAA |
| 7973 | GGCACUGAAAAUGGCUUCGUU | 13638 | GGCACTGAAAATGGCTTCGTT |
| 7974 | GGCACUGGAACUCGUUUCUUU | 13639 | GGCACTGGAACTCGTTTCTTT |
| 7975 | GGCACUGUCCGAAGCCUGUUC | 13640 | GGCACTGTCCGAAGCCTGTTC |
| 7976 | GGCACUUAAUAAAUAUUAAGG | 13641 | GGCACTTAATAAATATTAAGG |
| 7977 | GGCACUUGUAGCCACCCUCCA | 13642 | GGCACTTGTAGCCACCCTCCA |
| 7978 | GGCAGAUGUUCACGCCACGUC | 13643 | GGCAGATGTTCACGCCACGTC |
| 7979 | GGCAGCCGCCAUUGCUCAGGG | 13644 | GGCAGCCGCCATTGCTCAGGG |
| 7980 | GGCAGCCGGGAGGUGUCGGGA | 13645 | GGCAGCCGGGAGGTGTCGGGA |
| 7981 | GGCAGCGAAACUCGUCCUGGG | 13646 | GGCAGCGAAACTCGTCCTGGG |
| 7982 | GGCAGCUCCUCAUGUCCCUGG | 13647 | GGCAGCTCCTCATGTCCCTGG |
| 7983 | GGCAGGAGGCCUCGUCUGAGC | 13648 | GGCAGGAGGCCTCGTCTGAGC |
| 7984 | GGCAGGCAAUGCUUUGGUCUU | 13649 | GGCAGGCAATGCTTTGGTCTT |
| 7985 | GGCAGGCGCAGGUAAACUUGG | 13650 | GGCAGGCGCAGGTAAACTTGG |
| 7986 | GGCAGGGACGGGACUCCAGGC | 13651 | GGCAGGGACGGGACTCCAGGC |
| 7987 | GGCAGGGAGGCACAGAUACUG | 13652 | GGCAGGGAGGCACAGATACTG |
| 7988 | GGCAGGGCCAGGGGGUCCCGU | 13653 | GGCAGGGCCAGGGGGTCCCGT |
| 7989 | GGCAGUCUCUAGCCAUGUUGC | 13654 | GGCAGTCTCTAGCCATGTTGC |
| 7990 | GGCAGUGGAACUCGAAGGCCG | 13655 | GGCAGTGGAACTCGAAGGCCG |
| 7991 | GGCAGUGUCCCGACCCGGAUC | 13656 | GGCAGTGTCCCGACCCGGATC |
| 7992 | GGCAGUUCUCGAUAUUCACGA | 13657 | GGCAGTTCTCGATATTCACGA |
| 7993 | GGCAUAAUCAUAGCUCACGAC | 13658 | GGCATAATCATAGCTCACGAC |
| 7994 | GGCAUCAUUUGGUGAAUGAGU | 13659 | GGCATCATTTGGTGAATGAGT |
| 7995 | GGCAUUCAUUGACACGGGCUU | 13660 | GGCATTCATTGACACGGGCTT |
| 7996 | GGCAUUUCAGAGGCAAUAACC | 13661 | GGCATTTCAGAGGCAATAACC |
| 7997 | GGCAUUUGCAUAGAAGUGGAA | 13662 | GGCATTTGCATAGAAGTGGAA |
| 7998 | GGCCAAAUUCAUUUUUUAAGA | 13663 | GGCCAAATTCATTTTTTAAGA |
| 7999 | GGCCAAGGAGAAGGGGUGGGC | 13664 | GGCCAAGGAGAAGGGGTGGGC |
| 8000 | GGCCAAGGUAACCGGGUGUCU | 13665 | GGCCAAGGTAACCGGGTGTCT |
| 8001 | GGCCACAGCGCAGUUUUCCUC | 13666 | GGCCACAGCGCAGTTTTCCTC |
| 8002 | GGCCACAGGACAGCCUUGCUC | 13667 | GGCCACAGGACAGCCTTGCTC |
| 8003 | GGCCACCAGCUGGAAGCCGUC | 13668 | GGCCACCAGCTGGAAGCCGTC |
| 8004 | GGCCACCAUCACAGCGCCAGC | 13669 | GGCCACCATCACAGCGCCAGC |
| 8005 | GGCCACCUCCGUGUCCAGAGC | 13670 | GGCCACCTCCGTGTCCAGAGC |
| 8006 | GGCCACGUGUCCUCACGGCCA | 13671 | GGCCACGTGTCCTCACGGCCA |
| 8007 | GGCCACUCAUCCGAGCCAUCU | 13672 | GGCCACTCATCCGAGCCATCT |
| 8008 | GGCCACUGAAUGUUUUCAGUC | 13673 | GGCCACTGAATGTTTTCAGTC |
| 8009 | GGCCACUGAGGAGAUCUAGGG | 13674 | GGCCACTGAGGAGATCTAGGG |
| 8010 | GGCCACUGCAGCCUCAGCCUC | 13675 | GGCCACTGCAGCCTCAGCCTC |
| 8011 | GGCCAGACUGCGGACUGCAGU | 13676 | GGCCAGACTGCGGACTGCAGT |
| 8012 | GGCCAGAGGCCAUGGGCUGCU | 13677 | GGCCAGAGGCCATGGGCTGCT |
| 8013 | GGCCAGCAGCAUGCCGUCCGG | 13678 | GGCCAGCAGCATGCCGTCCGG |
| 8014 | GGCCAGCCUCUUUUCAUCCUC | 13679 | GGCCAGCCTCTTTTCATCCTC |
| 8015 | GGCCAGGGGGUCCCGUUGGUG | 13680 | GGCCAGGGGGTCCCGTTGGTG |
| 8016 | GGCCAUCGCACCUCCAGAACU | 13681 | GGCCATCGCACCTCCAGAACT |
| 8017 | GGCCAUGGGCUGCUGAUGCAC | 13682 | GGCCATGGGCTGCTGATGCAC |
| 8018 | GGCCCACAGCUGGGGGAUGCA | 13683 | GGCCCACAGCTGGGGGATGCA |
| 8019 | GGCCCAGGAUAACGGAGGGCG | 13684 | GGCCCAGGATAACGGAGGGCG |
| 8020 | GGCCCCAGGCAGCCGGGAGGU | 13685 | GGCCCCAGGCAGCCGGGAGGT |
| 8021 | GGCCCCAUGCUCGCAGCCUCU | 13686 | GGCCCCATGCTCGCAGCCTCT |
| 8022 | GGCCCCCACAGCUGAAGUCCC | 13687 | GGCCCCCACAGCTGAAGTCCC |
| 8023 | GGCCCCCUUUCUUGAUCUUGG | 13688 | GGCCCCCTTTCTTGATCTTGG |
| 8024 | GGCCCCGAGAAUAGUCACUGA | 13689 | GGCCCCGAGAATAGTCACTGA |
| 8025 | GGCCCCUCUGUGAACUUGAUC | 13690 | GGCCCCTCTGTGAACTTGATC |
| 8026 | GGCCCUUGGCUUGGAGCCGUU | 13691 | GGCCCTTGGCTTGGAGCCGTT |
| 8027 | GGCCGAGCAGGGGCUACUGUC | 13692 | GGCCGAGCAGGGGCTACTGTC |
| 8028 | GGCCGGCGAGGUCUCAGGAAG | 13693 | GGCCGGCGAGGTCTCAGGAAG |
| 8029 | GGCCGGGGGCCCCUCUGUGAA | 13694 | GGCCGGGGGCCCCTCTGTGAA |
| 8030 | GGCCUCACCGUGCAUGUUUUA | 13695 | GGCCTCACCGTGCATGTTTTA |
| 8031 | GGCCUCCCAAAGUGCUGGGAU | 13696 | GGCCTCCCAAAGTGCTGGGAT |
| 8032 | GGCCUCGUCUGAGCCGUCCAA | 13697 | GGCCTCGTCTGAGCCGTCCAA |
| 8033 | GGCCUGACAUCCCCUCCCCUU | 13698 | GGCCTGACATCCCCTCCCCTT |
| 8034 | GGCCUGGAUGUCUCUGCUGAU | 13699 | GGCCTGGATGTCTCTGCTGAT |
| 8035 | GGCCUGGGAUCCCAUCCCAAC | 13700 | GGCCTGGGATCCCATCCCAAC |
| 8036 | GGCCUGGUCUCCAACUCCUGA | 13701 | GGCCTGGTCTCCAACTCCTGA |
| 8037 | GGCCUGUUUCUCUUAUCCUUC | 13702 | GGCCTGTTTCTCTTATCCTTC |
| 8038 | GGCCUUCGUGUGGGGGUCCAG | 13703 | GGCCTTCGTGTGGGGGTCCAG |
| 8039 | GGCCUUGAGGGUGGCCGGGGG | 13704 | GGCCTTGAGGGTGGCCGGGGG |
| 8040 | GGCGACAGGUGGCCACAGCGC | 13705 | GGCGACAGGTGGCCACAGCGC |
| 8041 | GGCGACAGGUGGCCACAGGAC | 13706 | GGCGACAGGTGGCCACAGGAC |
| 8042 | GGCGACGGUCCAGCGCAAUUU | 13707 | GGCGACGGTCCAGCGCAATTT |
| 8043 | GGCGACUCGUGUAUGUCGCGG | 13708 | GGCGACTCGTGTATGTCGCGG |
| 8044 | GGCGAGGAGCAAGGCGACGGU | 13709 | GGCGAGGAGCAAGGCGACGGT |
| 8045 | GGCGAGGGCGCCCCCCAGGAC | 13710 | GGCGAGGGCGCCCCCCAGGAC |
| 8046 | GGCGAGGUCUCAGGAAGGGUU | 13711 | GGCGAGGTCTCAGGAAGGGTT |
| 8047 | GGCGAGUGGGGGUUGAUCUGC | 13712 | GGCGAGTGGGGGTTGATCTGC |
| 8048 | GGCGAUCCUCCUGCCUCAGCC | 13713 | GGCGATCCTCCTGCCTCAGCC |
| 8049 | GGCGAUGGAGCCCACAGCCUU | 13714 | GGCGATGGAGCCCACAGCCTT |
| 8050 | GGCGAUGGGGAGGACAAUGGA | 13715 | GGCGATGGGGAGGACAATGGA |
| 8051 | GGCGAUUUCAGAAAGAACCUG | 13716 | GGCGATTTCAGAAAGAACCTG |
| 8052 | GGCGCAAUCUCGGCUCACUGC | 13717 | GGCGCAATCTCGGCTCACTGC |
| 8053 | GGCGCAGGUAAACUUGGGCGA | 13718 | GGCGCAGGTAAACTTGGGCGA |
| 8054 | GGCGCCCCCCAGGACAAGGUG | 13719 | GGCGCCCCCCAGGACAAGGTG |
| 8055 | GGCGGACAUAAAGACGACAAU | 13720 | GGCGGACATAAAGACGACAAT |
| 8056 | GGCGGCCACUGAGGAGAUCUA | 13721 | GGCGGCCACTGAGGAGATCTA |
| 8057 | GGCGGCUCCGGGGACCCGGGA | 13722 | GGCGGCTCCGGGGACCCGGGA |
| 8058 | GGCGGGACCACAGGUGAGCAC | 13723 | GGCGGGACCACAGGTGAGCAC |
| 8059 | GGCGGGAGUUCCCCAGUCAGU | 13724 | GGCGGGAGTTCCCCAGTCAGT |
| 8060 | GGCGGGGAGAUUCUGAGGCAA | 13725 | GGCGGGGAGATTCTGAGGCAA |
| 8061 | GGCGGUUGGCACUGAAAAUGG | 13726 | GGCGGTTGGCACTGAAAATGG |
| 8062 | GGCGUGAGCCACUGCGCCCGG | 13727 | GGCGTGAGCCACTGCGCCCGG |
| 8063 | GGCGUGAGGCACCUGUGUCUG | 13728 | GGCGTGAGGCACCTGTGTCTG |
| 8064 | GGCUAACCUGGCUGUCUAGCA | 13729 | GGCTAACCTGGCTGTCTAGCA |
| 8065 | GGCUAAUUUUUUGUAUUUUUA | 13730 | GGCTAATTTTTTGTATTTTTA |
| 8066 | GGCUACAAAAACCUUCUAUAC | 13731 | GGCTACAAAAACCTTCTATAC |
| 8067 | GGCUACUGUCCCCUUGGAACA | 13732 | GGCTACTGTCCCCTTGGAACA |
| 8068 | GGCUCACUGCAACCUCCACCU | 13733 | GGCTCACTGCAACCTCCACCT |
| 8069 | GGCUCACUGCAAGCUCCGCUU | 13734 | GGCTCACTGCAAGCTCCGCTT |
| 8070 | GGCUCAGGCGAUCCUCCUGCC | 13735 | GGCTCAGGCGATCCTCCTGCC |
| 8071 | GGCUCCGGGGACCCGGGACUU | 13736 | GGCTCCGGGGACCCGGGACTT |
| 8072 | GGCUCGAUCAUGGCUCACUGC | 13737 | GGCTCGATCATGGCTCACTGC |
| 8073 | GGCUCUGCCUCUGGGAAGUGG | 13738 | GGCTCTGCCTCTGGGAAGTGG |
| 8074 | GGCUCUGUCAAGCUGGGUGCU | 13739 | GGCTCTGTCAAGCTGGGTGCT |
| 8075 | GGCUGAAGAUCUCGGCUGCAG | 13740 | GGCTGAAGATCTCGGCTGCAG |
| 8076 | GGCUGCAGACCAAGGAGGGGC | 13741 | GGCTGCAGACCAAGGAGGGGC |
| 8077 | GGCUGCAGGUGUCGGGAUCCU | 13742 | GGCTGCAGGTGTCGGGATCCT |
| 8078 | GGCUGCCAUGGAUGCAGUUUC | 13743 | GGCTGCCATGGATGCAGTTTC |
| 8079 | GGCUGCUGAUGCACCAUGCAU | 13744 | GGCTGCTGATGCACCATGCAT |
| 8080 | GGCUGGAAAGCAGUGGCAUAA | 13745 | GGCTGGAAAGCAGTGGCATAA |
| 8081 | GGCUGGAGUGCAGUGGCUCGA | 13746 | GGCTGGAGTGCAGTGGCTCGA |
| 8082 | GGCUGGGUGAGGUUGUGGAAG | 13747 | GGCTGGGTGAGGTTGTGGAAG |
| 8083 | GGCUGGUGGGGCGAGGGCGCC | 13748 | GGCTGGTGGGGCGAGGGCGCC |
| 8084 | GGCUGGUGUACUCGCUCCGGU | 13749 | GGCTGGTGTACTCGCTCCGGT |
| 8085 | GGCUGGUGUCCUGACAGCCAC | 13750 | GGCTGGTGTCCTGACAGCCAC |
| 8086 | GGCUGUCACUGUCUCUCCGGA | 13751 | GGCTGTCACTGTCTCTCCGGA |
| 8087 | GGCUGUCUAGCAAGGCUUGCA | 13752 | GGCTGTCTAGCAAGGCTTGCA |
| 8088 | GGCUGUGGAGCUGACCUUUAG | 13753 | GGCTGTGGAGCTGACCTTTAG |
| 8089 | GGCUUAAGGAAGGUACAAACC | 13754 | GGCTTAAGGAAGGTACAAACC |
| 8090 | GGCUUAGAGAUUGGUGGAUGA | 13755 | GGCTTAGAGATTGGTGGATGA |
| 8091 | GGCUUAUCACGGUUCCCUGCA | 13756 | GGCTTATCACGGTTCCCTGCA |
| 8092 | GGCUUCGUUGAUGAUAUCUGU | 13757 | GGCTTCGTTGATGATATCTGT |
| 8093 | GGCUUCUUCUCAUUUCCUCUG | 13758 | GGCTTCTTCTCATTTCCTCTG |
| 8094 | GGCUUGCAUAGAAGAGGUAAA | 13759 | GGCTTGCATAGAAGAGGTAAA |
| 8095 | GGCUUGGAGCCGUUCUCCCUG | 13760 | GGCTTGGAGCCGTTCTCCCTG |
| 8096 | GGCUUGGAGGCAUUUGCAUAG | 13761 | GGCTTGGAGGCATTTGCATAG |
| 8097 | GGCUUUCCCUGGCCUGGGAUC | 13762 | GGCTTTCCCTGGCCTGGGATC |
| 8098 | GGCUUUGAAGUCCCGGUCAAC | 13763 | GGCTTTGAAGTCCCGGTCAAC |
| 8099 | GGGAACAGCCGCCGUUGUUGU | 13764 | GGGAACAGCCGCCGTTGTTGT |
| 8100 | GGGAACAGGUCGGGUGGUUGU | 13765 | GGGAACAGGTCGGGTGGTTGT |
| 8101 | GGGAAGUGAAUGGCUUGGAGG | 13766 | GGGAAGTGAATGGCTTGGAGG |
| 8102 | GGGAAGUGGCAUCAUUUGGUG | 13767 | GGGAAGTGGCATCATTTGGTG |
| 8103 | GGGAAUGGAAGUGGGUAGGGG | 13768 | GGGAATGGAAGTGGGTAGGGG |
| 8104 | GGGACAAUUGCCAAUCCCUUG | 13769 | GGGACAATTGCCAATCCCTTG |
| 8105 | GGGACACAGUGUUUUGUCCCU | 13770 | GGGACACAGTGTTTTGTCCCT |
| 8106 | GGGACAGCCUUGCUCGUCUGA | 13771 | GGGACAGCCTTGCTCGTCTGA |
| 8107 | GGGACAGGUCAGACCAGUAGA | 13772 | GGGACAGGTCAGACCAGTAGA |
| 8108 | GGGACAGUAGGUUUUCAGCCA | 13773 | GGGACAGTAGGTTTTCAGCCA |
| 8109 | GGGACAUCAUUCUCCCAAAAA | 13774 | GGGACATCATTCTCCCAAAAA |
| 8110 | GGGACCACAGGUGAGCACCGG | 13775 | GGGACCACAGGTGAGCACCGG |
| 8111 | GGGACCCGGGACUUGUCGUCG | 13776 | GGGACCCGGGACTTGTCGTCG |
| 8112 | GGGACGCAUUUACGUGCUCCG | 13777 | GGGACGCATTTACGTGCTCCG |
| 8113 | GGGACGGAGGUGUCGCCACAG | 13778 | GGGACGGAGGTGTCGCCACAG |
| 8114 | GGGACGGGACUCCAGGCAGAU | 13779 | GGGACGGGACTCCAGGCAGAT |
| 8115 | GGGACUACAGGUGCCCGCCAC | 13780 | GGGACTACAGGTGCCCGCCAC |
| 8116 | GGGACUCAUCAGAGCCAUCCU | 13781 | GGGACTCATCAGAGCCATCCT |
| 8117 | GGGACUCCAGGCAGAUGUUCA | 13782 | GGGACTCCAGGCAGATGTTCA |
| 8118 | GGGACUUCGCCAGGAGGGCCC | 13783 | GGGACTTCGCCAGGAGGGCCC |
| 8119 | GGGACUUGUCGUCGCCUUUGU | 13784 | GGGACTTGTCGTCGCCTTTGT |
| 8120 | GGGAGAGGCACGCUCUGUCAC | 13785 | GGGAGAGGCACGCTCTGTCAC |
| 8121 | GGGAGAUUCUGAGGCAACGUU | 13786 | GGGAGATTCTGAGGCAACGTT |
| 8122 | GGGAGCACGUCUCCUGGGACU | 13787 | GGGAGCACGTCTCCTGGGACT |
| 8123 | GGGAGCACGUCUUGGGGGAGC | 13788 | GGGAGCACGTCTTGGGGGAGC |
| 8124 | GGGAGCACGUCUUGGGGGGAC | 13789 | GGGAGCACGTCTTGGGGGGAC |
| 8125 | GGGAGGACAAUGGACAGAGCC | 13790 | GGGAGGACAATGGACAGAGCC |
| 8126 | GGGAGGAUGGGCACCAGGCUG | 13791 | GGGAGGATGGGCACCAGGCTG |
| 8127 | GGGAGGCACAGAUACUGGCAG | 13792 | GGGAGGCACAGATACTGGCAG |
| 8128 | GGGAGGUGUCGGGAACAGGUC | 13793 | GGGAGGTGTCGGGAACAGGTC |
| 8129 | GGGAGUCUGACGGAGGCUGUC | 13794 | GGGAGTCTGACGGAGGCTGTC |
| 8130 | GGGAGUUCCCCAGUCAGUCCA | 13795 | GGGAGTTCCCCAGTCAGTCCA |
| 8131 | GGGAUCACAGGCACGUGCCAC | 13796 | GGGATCACAGGCACGTGCCAC |
| 8132 | GGGAUCCCAUCCCAACACACA | 13797 | GGGATCCCATCCCAACACACA |
| 8133 | GGGAUCCUGACACUCAUCGAU | 13798 | GGGATCCTGACACTCATCGAT |
| 8134 | GGGAUCUCGCUUUGUUGCUCA | 13799 | GGGATCTCGCTTTGTTGCTCA |
| 8135 | GGGAUGAGGCUGGUGUACUCG | 13800 | GGGATGAGGCTGGTGTACTCG |
| 8136 | GGGAUGCAGGUGGAGCUGUUG | 13801 | GGGATGCAGGTGGAGCTGTTG |
| 8137 | GGGAUUACAGGCGUGAGCCAC | 13802 | GGGATTACAGGCGTGAGCCAC |
| 8138 | GGGAUUACAGGCGUGAGGCAC | 13803 | GGGATTACAGGCGTGAGGCAC |
| 8139 | GGGCAAAGGCUAACCUGGCUG | 13804 | GGGCAAAGGCTAACCTGGCTG |
| 8140 | GGGCACAGGCACUCGUAGCCG | 13805 | GGGCACAGGCACTCGTAGCCG |
| 8141 | GGGCACCAGGCUGGUGUCCUG | 13806 | GGGCACCAGGCTGGTGTCCTG |
| 8142 | GGGCACUGUCCGAAGCCUGUU | 13807 | GGGCACTGTCCGAAGCCTGTT |
| 8143 | GGGCAGGAGGCCUCGUCUGAG | 13808 | GGGCAGGAGGCCTCGTCTGAG |
| 8144 | GGGCAGGCGCAGGUAAACUUG | 13809 | GGGCAGGCGCAGGTAAACTTG |
| 8145 | GGGCAGGGACGGGACUCCAGG | 13810 | GGGCAGGGACGGGACTCCAGG |
| 8146 | GGGCAGGGAGGCACAGAUACU | 13811 | GGGCAGGGAGGCACAGATACT |
| 8147 | GGGCCACCAGCUGGAAGCCGU | 13812 | GGGCCACCAGCTGGAAGCCGT |
| 8148 | GGGCCACCAUCACAGCGCCAG | 13813 | GGGCCACCATCACAGCGCCAG |
| 8149 | GGGCCACUGAAUGUUUUCAGU | 13814 | GGGCCACTGAATGTTTTCAGT |
| 8150 | GGGCCAGCCUCUUUUCAUCCU | 13815 | GGGCCAGCCTCTTTTCATCCT |
| 8151 | GGGCCAGGGGGUCCCGUUGGU | 13816 | GGGCCAGGGGGTCCCGTTGGT |
| 8152 | GGGCCCAGGAUAACGGAGGGC | 13817 | GGGCCCAGGATAACGGAGGGC |
| 8153 | GGGCCCCAUGCUCGCAGCCUC | 13818 | GGGCCCCATGCTCGCAGCCTC |
| 8154 | GGGCCCCGAGAAUAGUCACUG | 13819 | GGGCCCCGAGAATAGTCACTG |
| 8155 | GGGCCCCUCUGUGAACUUGAU | 13820 | GGGCCCCTCTGTGAACTTGAT |
| 8156 | GGGCCUGACAUCCCCUCCCCU | 13821 | GGGCCTGACATCCCCTCCCCT |
| 8157 | GGGCCUGGAUGUCUCUGCUGA | 13822 | GGGCCTGGATGTCTCTGCTGA |
| 8158 | GGGCCUGUUUCUCUUAUCCUU | 13823 | GGGCCTGTTTCTCTTATCCTT |
| 8159 | GGGCGACAGGUGGCCACAGCG | 13824 | GGGCGACAGGTGGCCACAGCG |
| 8160 | GGGCGACAGGUGGCCACAGGA | 13825 | GGGCGACAGGTGGCCACAGGA |
| 8161 | GGGCGACUCGUGUAUGUCGCG | 13826 | GGGCGACTCGTGTATGTCGCG |
| 8162 | GGGCGAGGGCGCCCCCCAGGA | 13827 | GGGCGAGGGCGCCCCCCAGGA |
| 8163 | GGGCGAGUGGGGGUUGAUCUG | 13828 | GGGCGAGTGGGGGTTGATCTG |
| 8164 | GGGCGCCCCCCAGGACAAGGU | 13829 | GGGCGCCCCCCAGGACAAGGT |
| 8165 | GGGCGGACAUAAAGACGACAA | 13830 | GGGCGGACATAAAGACGACAA |
| 8166 | GGGCGGGGAGAUUCUGAGGCA | 13831 | GGGCGGGGAGATTCTGAGGCA |
| 8167 | GGGCUACUGUCCCCUUGGAAC | 13832 | GGGCTACTGTCCCCTTGGAAC |
| 8168 | GGGCUCAGGCGAUCCUCCUGC | 13833 | GGGCTCAGGCGATCCTCCTGC |
| 8169 | GGGCUCUGUCAAGCUGGGUGC | 13834 | GGGCTCTGTCAAGCTGGGTGC |
| 8170 | GGGCUGCUGAUGCACCAUGCA | 13835 | GGGCTGCTGATGCACCATGCA |
| 8171 | GGGCUGGUGGGGCGAGGGCGC | 13836 | GGGCTGGTGGGGCGAGGGCGC |
| 8172 | GGGCUUCUUCUCAUUUCCUCU | 13837 | GGGCTTCTTCTCATTTCCTCT |
| 8173 | GGGCUUUCCCUGGCCUGGGAU | 13838 | GGGCTTTCCCTGGCCTGGGAT |
| 8174 | GGGGAAGUGAAUGGCUUGGAG | 13839 | GGGGAAGTGAATGGCTTGGAG |
| 8175 | GGGGACAAUUGCCAAUCCCUU | 13840 | GGGGACAATTGCCAATCCCTT |
| 8176 | GGGGACACAGUGUUUUGUCCC | 13841 | GGGGACACAGTGTTTTGTCCC |
| 8177 | GGGGACAGCCUUGCUCGUCUG | 13842 | GGGGACAGCCTTGCTCGTCTG |
| 8178 | GGGGACAGUAGGUUUUCAGCC | 13843 | GGGGACAGTAGGTTTTCAGCC |
| 8179 | GGGGACAUCAUUCUCCCAAAA | 13844 | GGGGACATCATTCTCCCAAAA |
| 8180 | GGGGACCCGGGACUUGUCGUC | 13845 | GGGGACCCGGGACTTGTCGTC |
| 8181 | GGGGACGGAGGUGUCGCCACA | 13846 | GGGGACGGAGGTGTCGCCACA |
| 8182 | GGGGACUUCGCCAGGAGGGCC | 13847 | GGGGACTTCGCCAGGAGGGCC |
| 8183 | GGGGAGAUUCUGAGGCAACGU | 13848 | GGGGAGATTCTGAGGCAACGT |
| 8184 | GGGGAGCACGUCUCCUGGGAC | 13849 | GGGGAGCACGTCTCCTGGGAC |
| 8185 | GGGGAGGACAAUGGACAGAGC | 13850 | GGGGAGGACAATGGACAGAGC |
| 8186 | GGGGAUGAGGCUGGUGUACUC | 13851 | GGGGATGAGGCTGGTGTACTC |
| 8187 | GGGGAUGCAGGUGGAGCUGUU | 13852 | GGGGATGCAGGTGGAGCTGTT |
| 8188 | GGGGCACAGGCACUCGUAGCC | 13853 | GGGGCACAGGCACTCGTAGCC |
| 8189 | GGGGCAGGGAGGCACAGAUAC | 13854 | GGGGCAGGGAGGCACAGATAC |
| 8190 | GGGGCCACCAUCACAGCGCCA | 13855 | GGGGCCACCATCACAGCGCCA |
| 8191 | GGGGCCCCUCUGUGAACUUGA | 13856 | GGGGCCCCTCTGTGAACTTGA |
| 8192 | GGGGCCUGGAUGUCUCUGCUG | 13857 | GGGGCCTGGATGTCTCTGCTG |
| 8193 | GGGGCGAGGGCGCCCCCCAGG | 13858 | GGGGCGAGGGCGCCCCCCAGG |
| 8194 | GGGGGGGGGAGAUUCUGAGGC | 13859 | GGGGGGGGGAGATTCTGAGGC |
| 8195 | GGGGCUACUGUCCCCUUGGAA | 13860 | GGGGCTACTGTCCCCTTGGAA |
| 8196 | GGGGCUGGUGGGGCGAGGGCG | 13861 | GGGGCTGGTGGGGCGAGGGCG |
| 8197 | GGGGGACACAGUGUUUUGUCC | 13862 | GGGGGACACAGTGTTTTGTCC |
| 8198 | GGGGGACAGCCUUGCUCGUCU | 13863 | GGGGGACAGCCTTGCTCGTCT |
| 8199 | GGGGGAGCACGUCUCCUGGGA | 13864 | GGGGGAGCACGTCTCCTGGGA |
| 8200 | GGGGGAUGCAGGUGGAGCUGU | 13865 | GGGGGATGCAGGTGGAGCTGT |
| 8201 | GGGGGCCCCUCUGUGAACUUG | 13866 | GGGGGCCCCTCTGTGAACTTG |
| 8202 | GGGGGCCUGGAUGUCUCUGCU | 13867 | GGGGGCCTGGATGTCTCTGCT |
| 8203 | GGGGGGACACAGUGUUUUGUC | 13868 | GGGGGGACACAGTGTTTTGTC |
| 8204 | GGGGGGACAGCCUUGCUCGUC | 13869 | GGGGGGACAGCCTTGCTCGTC |
| 8205 | GGGGGGGACACAGUGUUUUGU | 13870 | GGGGGGGACACAGTGTTTTGT |
| 8206 | GGGGGUCCAGCUGGAAGCCUU | 13871 | GGGGGTCCAGCTGGAAGCCTT |
| 8207 | GGGGGUCCCGUUGGUGCCAUC | 13872 | GGGGGTCCCGTTGGTGCCATC |
| 8208 | GGGGGUGACAGGGCAAAGGCU | 13873 | GGGGGTGACAGGGCAAAGGCT |
| 8209 | GGGGGUUGAUCUGCGGGGCAG | 13874 | GGGGGTTGATCTGCGGGGCAG |
| 8210 | GGGGUAGCUGUAGCCGUCCUG | 13875 | GGGGTAGCTGTAGCCGTCCTG |
| 8211 | GGGGUCCAGCUGGAAGCCUUC | 13876 | GGGGTCCAGCTGGAAGCCTTC |
| 8212 | GGGGUCCCGUUGGUGCCAUCU | 13877 | GGGGTCCCGTTGGTGCCATCT |
| 8213 | GGGGUCGGGAGGAUGGGCACC | 13878 | GGGGTCGGGAGGATGGGCACC |
| 8214 | GGGGUCGUUGUCGCAGGCCCA | 13879 | GGGGTCGTTGTCGCAGGCCCA |
| 8215 | GGGGUCUUACUAUGUUGCCCA | 13880 | GGGGTCTTACTATGTTGCCCA |
| 8216 | GGGGUGACAGGGCAAAGGCUA | 13881 | GGGGTGACAGGGCAAAGGCTA |
| 8217 | GGGGUGGCCCCAGGCAGCCGG | 13882 | GGGGTGGCCCCAGGCAGCCGG |
| 8218 | GGGGUGGGCCAGCCUCUUUUC | 13883 | GGGGTGGGCCAGCCTCTTTTC |
| 8219 | GGGGUUGAUCUGCGGGGCAGG | 13884 | GGGGTTGATCTGCGGGGCAGG |
| 8220 | GGGGUUGUCAAAGUUGAUGCU | 13885 | GGGGTTGTCAAAGTTGATGCT |
| 8221 | GGGGUUUCACGUGUUAGCCAG | 13886 | GGGGTTTCACGTGTTAGCCAG |
| 8222 | GGGGUUUGGCUUAGAGAUUGG | 13887 | GGGGTTTGGCTTAGAGATTGG |
| 8223 | GGGUAGCUGUAGCCGUCCUGG | 13888 | GGGTAGCTGTAGCCGTCCTGG |
| 8224 | GGGUAGGGGUCGGGAGGAUGG | 13889 | GGGTAGGGGTCGGGAGGATGG |
| 8225 | GGGUCAUGAUUCGGGGGUGAC | 13890 | GGGTCATGATTCGGGGGTGAC |
| 8226 | GGGUCCAGCUGGAAGCCUUCC | 13891 | GGGTCCAGCTGGAAGCCTTCC |
| 8227 | GGGUCCCGUUGGUGCCAUCUG | 13892 | GGGTCCCGTTGGTGCCATCTG |
| 8228 | GGGUCCCUCGCAGAGUGUCAC | 13893 | GGGTCCCTCGCAGAGTGTCAC |
| 8229 | GGGUCCCUCGCAGAGUGUCAG | 13894 | GGGTCCCTCGCAGAGTGTCAG |
| 8230 | GGGUCGGGAGGAUGGGCACCA | 13895 | GGGTCGGGAGGATGGGCACCA |
| 8231 | GGGUCGUUGUCGCAGGCCCAC | 13896 | GGGTCGTTGTCGCAGGCCCAC |
| 8232 | GGGUCUUACUAUGUUGCCCAG | 13897 | GGGTCTTACTATGTTGCCCAG |
| 8233 | GGGUCUUCAUCUGUUGCCCAG | 13898 | GGGTCTTCATCTGTTGCCCAG |
| 8234 | GGGUGACAGGGCAAAGGCUAA | 13899 | GGGTGACAGGGCAAAGGCTAA |
| 8235 | GGGUGACCAGUGACUCAGGCU | 13900 | GGGTGACCAGTGACTCAGGCT |
| 8236 | GGGUGAGGUUGUGGAAGAGAA | 13901 | GGGTGAGGTTGTGGAAGAGAA |
| 8237 | GGGUGAUGCAUUCGCCGCUGU | 13902 | GGGTGATGCATTCGCCGCTGT |
| 8238 | GGGUGAUGCCAUUGGGCCACU | 13903 | GGGTGATGCCATTGGGCCACT |
| 8239 | GGGUGCAGGCCACGUGUCCUC | 13904 | GGGTGCAGGCCACGTGTCCTC |
| 8240 | GGGUGCUGCAGAUCAUUCUCU | 13905 | GGGTGCTGCAGATCATTCTCT |
| 8241 | GGGUGGCCACUGCAGCCUCAG | 13906 | GGGTGGCCACTGCAGCCTCAG |
| 8242 | GGGUGGCCCCAGGCAGCCGGG | 13907 | GGGTGGCCCCAGGCAGCCGGG |
| 8243 | GGGUGGCCGGGGGCCCCUCUG | 13908 | GGGTGGCCGGGGGCCCCTCTG |
| 8244 | GGGUGGGCCAGCCUCUUUUCA | 13909 | GGGTGGGCCAGCCTCTTTTCA |
| 8245 | GGGUGGGUCAUGAUUCGGGGG | 13910 | GGGTGGGTCATGATTCGGGGG |
| 8246 | GGGUGGUCCUCUCACACCAGU | 13911 | GGGTGGTCCTCTCACACCAGT |
| 8247 | GGGUGGUUGUGUGCUGUGUCC | 13912 | GGGTGGTTGTGTGCTGTGTCC |
| 8248 | GGGUGUCUCAGGCACUUAAUA | 13913 | GGGTGTCTCAGGCACTTAATA |
| 8249 | GGGUUCACACCAUUCUCCUGC | 13914 | GGGTTCACACCATTCTCCTGC |
| 8250 | GGGUUCAUCUGACCAGUCCCG | 13915 | GGGTTCATCTGACCAGTCCCG |
| 8251 | GGGUUCUGGGCAGGGACGGGA | 13916 | GGGTTCTGGGCAGGGACGGGA |
| 8252 | GGGUUGAUCUGCGGGGCAGGG | 13917 | GGGTTGATCTGCGGGGCAGGG |
| 8253 | GGGUUGUCAAAGUUGAUGCUG | 13918 | GGGTTGTCAAAGTTGATGCTG |
| 8254 | GGGUUUCACGUGUUAGCCAGG | 13919 | GGGTTTCACGTGTTAGCCAGG |
| 8255 | GGGUUUGCAAAAAUAAAUAGA | 13920 | GGGTTTGCAAAAATAAATAGA |
| 8256 | GGGUUUGGCUUAGAGAUUGGU | 13921 | GGGTTTGGCTTAGAGATTGGT |
| 8257 | GGUAAACACGUUGACUCCUGA | 13922 | GGTAAACACGTTGACTCCTGA |
| 8258 | GGUAAACUUGGGCGAGUGGGG | 13923 | GGTAAACTTGGGCGAGTGGGG |
| 8259 | GGUAACCGGGUGUCUCAGGCA | 13924 | GGTAACCGGGTGTCTCAGGCA |
| 8260 | GGUACAAACCCACCUCGAAAG | 13925 | GGTACAAACCCACCTCGAAAG |
| 8261 | GGUAGCUGUAGCCGUCCUGGU | 13926 | GGTAGCTGTAGCCGTCCTGGT |
| 8262 | GGUAGGCGAUGGAGCCCACAG | 13927 | GGTAGGCGATGGAGCCCACAG |
| 8263 | GGUAGGGGUCGGGAGGAUGGG | 13928 | GGTAGGGGTCGGGAGGATGGG |
| 8264 | GGUAUCCGCAACAGAGACAGU | 13929 | GGTATCCGCAACAGAGACAGT |
| 8265 | GGUCAACCUGCCCCUCUCUGU | 13930 | GGTCAACCTGCCCCTCTCTGT |
| 8266 | GGUCACACUGCCGGCUGCCAU | 13931 | GGTCACACTGCCGGCTGCCAT |
| 8267 | GGUCAGACCAGUAGAUUCUAU | 13932 | GGTCAGACCAGTAGATTCTAT |
| 8268 | GGUCAUGAUUCGGGGGUGACA | 13933 | GGTCATGATTCGGGGGTGACA |
| 8269 | GGUCAUUGCAGACGUGGGAAC | 13934 | GGTCATTGCAGACGTGGGAAC |
| 8270 | GGUCCAGCGCAAUUUCCAGCC | 13935 | GGTCCAGCGCAATTTCCAGCC |
| 8271 | GGUCCAGCGUCAUCUUCCUGA | 13936 | GGTCCAGCGTCATCTTCCTGA |
| 8272 | GGUCCAGCUGGAAGCCUUCCU | 13937 | GGTCCAGCTGGAAGCCTTCCT |
| 8273 | GGUCCAGUAGAUGUUGCUGUG | 13938 | GGTCCAGTAGATGTTGCTGTG |
| 8274 | GGUCCCCCCGGGCCUGUUUCU | 13939 | GGTCCCCCCGGGCCTGTTTCT |
| 8275 | GGUCCCGCACUCUUUGAUGGG | 13940 | GGTCCCGCACTCTTTGATGGG |
| 8276 | GGUCCCGUUGGUGCCAUCUGC | 13941 | GGTCCCGTTGGTGCCATCTGC |
| 8277 | GGUCCCUCGCAGAGUGUCACA | 13942 | GGTCCCTCGCAGAGTGTCACA |
| 8278 | GGUCCCUCGCAGAGUGUCAGA | 13943 | GGTCCCTCGCAGAGTGTCAGA |
| 8279 | GGUCCUCUCACACCAGUUCAC | 13944 | GGTCCTCTCACACCAGTTCAC |
| 8280 | GGUCGGGAGGAUGGGCACCAG | 13945 | GGTCGGGAGGATGGGCACCAG |
| 8281 | GGUCGGGUGGUUGUGUGCUGU | 13946 | GGTCGGGTGGTTGTGTGCTGT |
| 8282 | GGUCGUUGUCGCAGGCCCACA | 13947 | GGTCGTTGTCGCAGGCCCACA |
| 8283 | GGUCUCAGGAAGGGUUCUGGG | 13948 | GGTCTCAGGAAGGGTTCTGGG |
| 8284 | GGUCUCCAACUCCUGAACUCA | 13949 | GGTCTCCAACTCCTGAACTCA |
| 8285 | GGUCUCGAUCUCCUGACCUCA | 13950 | GGTCTCGATCTCCTGACCTCA |
| 8286 | GGUCUCGGUGCCACCACGGAU | 13951 | GGTCTCGGTGCCACCACGGAT |
| 8287 | GGUCUGAGUCACAGACGAACU | 13952 | GGTCTGAGTCACAGACGAACT |
| 8288 | GGUCUUACUAUGUUGCCCAGG | 13953 | GGTCTTACTATGTTGCCCAGG |
| 8289 | GGUCUUCAUCUGUUGCCCAGG | 13954 | GGTCTTCATCTGTTGCCCAGG |
| 8290 | GGUCUUCCGGUUGCCCCCGUU | 13955 | GGTCTTCCGGTTGCCCCCGTT |
| 8291 | GGUCUUCUCUGUCUUUGAAUA | 13956 | GGTCTTCTCTGTCTTTGAATA |
| 8292 | GGUCUUCUGAUAGACGGGGUU | 13957 | GGTCTTCTGATAGACGGGGTT |
| 8293 | GGUGAAGAAGAGGUAGGCGAU | 13958 | GGTGAAGAAGAGGTAGGCGAT |
| 8294 | GGUGAAUGAGUUUGGUCUCGG | 13959 | GGTGAATGAGTTTGGTCTCGG |
| 8295 | GGUGACAGACAAGCACGUCUC | 13960 | GGTGACAGACAAGCACGTCTC |
| 8296 | GGUGACAGGGCAAAGGCUAAC | 13961 | GGTGACAGGGCAAAGGCTAAC |
| 8297 | GGUGACCAGUGACUCAGGCUC | 13962 | GGTGACCAGTGACTCAGGCTC |
| 8298 | GGUGAGACAUUGUCACUAUCU | 13963 | GGTGAGACATTGTCACTATCT |
| 8299 | GGUGAGCACCGGGCAGGAGGC | 13964 | GGTGAGCACCGGGCAGGAGGC |
| 8300 | GGUGAGCCCAGGGGUGGCCCC | 13965 | GGTGAGCCCAGGGGTGGCCCC |
| 8301 | GGUGAGGUUGUGGAAGAGAAC | 13966 | GGTGAGGTTGTGGAAGAGAAC |
| 8302 | GGUGAUGCAUUCGCCGCUGUG | 13967 | GGTGATGCATTCGCCGCTGTG |
| 8303 | GGUGAUGCCAUUGGGCCACUG | 13968 | GGTGATGCCATTGGGCCACTG |
| 8304 | GGUGCAGGCCACGUGUCCUCA | 13969 | GGTGCAGGCCACGTGTCCTCA |
| 8305 | GGUGCCACCACGGAUUCAGCC | 13970 | GGTGCCACCACGGATTCAGCC |
| 8306 | GGUGCCAUCUGCUGUUGUGUG | 13971 | GGTGCCATCTGCTGTTGTGTG |
| 8307 | GGUGCCCGCCACCACGCCCGG | 13972 | GGTGCCCGCCACCACGCCCGG |
| 8308 | GGUGCUGCAGAUCAUUCUCUG | 13973 | GGTGCTGCAGATCATTCTCTG |
| 8309 | GGUGGAGAGAAACUCAAAACU | 13974 | GGTGGAGAGAAACTCAAAACT |
| 8310 | GGUGGAGCUGUUGCACUGGAA | 13975 | GGTGGAGCTGTTGCACTGGAA |
| 8311 | GGUGGAUGAGGCAGGGCCAGG | 13976 | GGTGGATGAGGCAGGGCCAGG |
| 8312 | GGUGGAUGUCUCCUGGGUGGC | 13977 | GGTGGATGTCTCCTGGGTGGC |
| 8313 | GGUGGCCACAGCGCAGUUUUC | 13978 | GGTGGCCACAGCGCAGTTTTC |
| 8314 | GGUGGCCACAGGACAGCCUUG | 13979 | GGTGGCCACAGGACAGCCTTG |
| 8315 | GGUGGCCACUGCAGCCUCAGC | 13980 | GGTGGCCACTGCAGCCTCAGC |
| 8316 | GGUGGCCCCAGGCAGCCGGGA | 13981 | GGTGGCCCCAGGCAGCCGGGA |
| 8317 | GGUGGCCGGGGGCCCCUCUGU | 13982 | GGTGGCCGGGGGCCCCTCTGT |
| 8318 | GGUGGGCCAGCCUCUUUUCAU | 13983 | GGTGGGCCAGCCTCTTTTCAT |
| 8319 | GGUGGGCGGACAUAAAGACGA | 13984 | GGTGGGCGGACATAAAGACGA |
| 8320 | GGUGGGGACGGAGGUGUCGCC | 13985 | GGTGGGGACGGAGGTGTCGCC |
| 8321 | GGUGGGGCGAGGGCGCCCCCC | 13986 | GGTGGGGCGAGGGCGCCCCCC |
| 8322 | GGUGGGUCAUGAUUCGGGGGU | 13987 | GGTGGGTCATGATTCGGGGGT |
| 8323 | GGUGGUCCUCUCACACCAGUU | 13988 | GGTGGTCCTCTCACACCAGTT |
| 8324 | GGUGGUUGUGUGCUGUGUCCU | 13989 | GGTGGTTGTGTGCTGTGTCCT |
| 8325 | GGUGUACUCGCUCCGGUCCAG | 13990 | GGTGTACTCGCTCCGGTCCAG |
| 8326 | GGUGUCAUAGGAAGAGACGCC | 13991 | GGTGTCATAGGAAGAGACGCC |
| 8327 | GGUGUCAUCCUGGUCCCCCCG | 13992 | GGTGTCATCCTGGTCCCCCCG |
| 8328 | GGUGUCCUGACAGCCACACCU | 13993 | GGTGTCCTGACAGCCACACCT |
| 8329 | GGUGUCGCCACAGAGCACAGC | 13994 | GGTGTCGCCACAGAGCACAGC |
| 8330 | GGUGUCGGGAACAGGUCGGGU | 13995 | GGTGTCGGGAACAGGTCGGGT |
| 8331 | GGUGUCGGGAUCCUGACACUC | 13996 | GGTGTCGGGATCCTGACACTC |
| 8332 | GGUGUCUCAGGCACUUAAUAA | 13997 | GGTGTCTCAGGCACTTAATAA |
| 8333 | GGUUCACACCAUUCUCCUGCC | 13998 | GGTTCACACCATTCTCCTGCC |
| 8334 | GGUUCACGCAGAGCUGGCUGC | 13999 | GGTTCACGCAGAGCTGGCTGC |
| 8335 | GGUUCAUCUGACCAGUCCCGG | 14000 | GGTTCATCTGACCAGTCCCGG |
| 8336 | GGUUCAUUUAAGAAAUUUAAU | 14001 | GGTTCATTTAAGAAATTTAAT |
| 8337 | GGUUCCCUGCACUGGGGGGGA | 14002 | GGTTCCCTGCACTGGGGGGGA |
| 8338 | GGUUCUGGGCAGGGACGGGAC | 14003 | GGTTCTGGGCAGGGACGGGAC |
| 8339 | GGUUGACACGGCCCCCACAGC | 14004 | GGTTGACACGGCCCCCACAGC |
| 8340 | GGUUGAUCUGCGGGGCAGGGA | 14005 | GGTTGATCTGCGGGGCAGGGA |
| 8341 | GGUUGCCCCCGUUGACAUCGA | 14006 | GGTTGCCCCCGTTGACATCGA |
| 8342 | GGUUGGCACUGAAAAUGGCUU | 14007 | GGTTGGCACTGAAAATGGCTT |
| 8343 | GGUUGGGGAUGAGGCUGGUGU | 14008 | GGTTGGGGATGAGGCTGGTGT |
| 8344 | GGUUGGUGAAGAAGAGGUAGG | 14009 | GGTTGGTGAAGAAGAGGTAGG |
| 8345 | GGUUGUCAAAGUUGAUGCUGU | 14010 | GGTTGTCAAAGTTGATGCTGT |
| 8346 | GGUUGUGGAAGAGAACCAUAU | 14011 | GGTTGTGGAAGAGAACCATAT |
| 8347 | GGUUGUGGCAAAUGUGGACCU | 14012 | GGTTGTGGCAAATGTGGACCT |
| 8348 | GGUUGUGUGCUGUGUCCUUAC | 14013 | GGTTGTGTGCTGTGTCCTTAC |
| 8349 | GGUUUAAAAAGUGACACCCAU | 14014 | GGTTTAAAAAGTGACACCCAT |
| 8350 | GGUUUCACGUGUUAGCCAGGA | 14015 | GGTTTCACGTGTTAGCCAGGA |
| 8351 | GGUUUGCAAAAAUAAAUAGAU | 14016 | GGTTTGCAAAAATAAATAGAT |
| 8352 | GGUUUGGCUUAGAGAUUGGUG | 14017 | GGTTTGGCTTAGAGATTGGTG |
| 8353 | GGUUUUCAGCCAACAAGUUGA | 14018 | GGTTTTCAGCCAACAAGTIGA |
| 8354 | GGUUUUUGUAGAGAUGGGAUC | 14019 | GGTTTTTGTAGAGATGGGATC |
| 8355 | GGUUUUUUUUUGUUUUUUUUU | 14020 | GGTTTTTTTTTGTTTTTTTTT |
| 8356 | GUAAACACGUUGACUCCUGAG | 14021 | GTAAACACGTTGACTCCTGAG |
| 8357 | GUAAACUUGGGCGAGUGGGGG | 14022 | GTAAACTTGGGCGAGTGGGGG |
| 8358 | GUAAAGACCCCUACAGCGCUG | 14023 | GTAAAGACCCCTACAGCGCTG |
| 8359 | GUAACACGGCGAUUUCAGAAA | 14024 | GTAACACGGCGATTTCAGAAA |
| 8360 | GUAACCGGGUGUCUCAGGCAC | 14025 | GTAACCGGGTGTCTCAGGCAC |
| 8361 | GUAAGACAUUCAGGCUACAAA | 14026 | GTAAGACATTCAGGCTACAAA |
| 8362 | GUAAGGAACCGAGGCCUUGAG | 14027 | GTAAGGAACCGAGGCCTTGAG |
| 8363 | GUACAAACCCACCUCGAAAGA | 14028 | GTACAAACCCACCTCGAAAGA |
| 8364 | GUACAACUCUGAACUGAGAAA | 14029 | GTACAACTCTGAACTGAGAAA |
| 8365 | GUACACAGUGUACAACUCUGA | 14030 | GTACACAGTGTACAACTCTGA |
| 8366 | GUACAGGGACGCAUUUACGUG | 14031 | GTACAGGGACGCATTTACGTG |
| 8367 | GUACAUAAAGAAGAGGCAUUU | 14032 | GTACATAAAGAAGAGGCATTT |
| 8368 | GUACAUGAAGCCAUGAACAGG | 14033 | GTACATGAAGCCATGAACAGG |
| 8369 | GUACCCAGCUGAUUUUUAACU | 14034 | GTACCCAGCTGATTTTTAACT |
| 8370 | GUACUCGCUCCGGUCCAGCGU | 14035 | GTACTCGCTCCGGTCCAGCGT |
| 8371 | GUAGAGACGGGGUUUCACGUG | 14036 | GTAGAGACGGGGTTTCACGTG |
| 8372 | GUAGAGAUGGGAUCUCGCUUU | 14037 | GTAGAGATGGGATCTCGCTTT |
| 8373 | GUAGAGGCGGCCACUGAGGAG | 14038 | GTAGAGGCGGCCACTGAGGAG |
| 8374 | GUAGAUGUCCACACCAUUCAG | 14039 | GTAGATGTCCACACCATTCAG |
| 8375 | GUAGAUGUUGCUGUGGAUCCA | 14040 | GTAGATGTTGCTGTGGATCCA |
| 8376 | GUAGAUUCUAUUGCUGGCCAC | 14041 | GTAGATTCTATTGCTGGCCAC |
| 8377 | GUAGCCACCCUCCAGGUUCAC | 14042 | GTAGCCACCCTCCAGGTTCAC |
| 8378 | GUAGCCGAUCUUAAGGUCAUU | 14043 | GTAGCCGATCTTAAGGTCATT |
| 8379 | GUAGCCGUCCUGGUUGUGGCA | 14044 | GTAGCCGTCCTGGTTGTGGCA |
| 8380 | GUAGCUGGGACUACAGGUGCC | 14045 | GTAGCTGGGACTACAGGTGCC |
| 8381 | GUAGCUGGGAUCACAGGCACG | 14046 | GTAGCTGGGATCACAGGCACG |
| 8382 | GUAGCUGUAGCCGUCCUGGUU | 14047 | GTAGCTGTAGCCGTCCTGGTT |
| 8383 | GUAGGAGAUGCAUUUCCCGUC | 14048 | GTAGGAGATGCATTTCCCGTC |
| 8384 | GUAGGCGAUGGAGCCCACAGC | 14049 | GTAGGCGATGGAGCCCACAGC |
| 8385 | GUAGGGAGAGGCACGCUCUGU | 14050 | GTAGGGAGAGGCACGCTCTGT |
| 8386 | GUAGGGGUCGGGAGGAUGGGC | 14051 | GTAGGGGTCGGGAGGATGGGC |
| 8387 | GUAGGUUUUCAGCCAACAAGU | 14052 | GTAGGTTTTCAGCCAACAAGT |
| 8388 | GUAUAUAUAUAUAUAUAAGUG | 14053 | GTATATATATATATATAAGTG |
| 8389 | GUAUCCGCAACAGAGACAGUG | 14054 | GTATCCGCAACAGAGACAGTG |
| 8390 | GUAUGUCGCGGAGGCGGCUCC | 14055 | GTATGTCGCGGAGGCGGCTCC |
| 8391 | GUAUUUCUGAAAUAGGGUCUU | 14056 | GTATTTCTGAAATAGGGTCTT |
| 8392 | GUAUUUUUAGUAGAGACGGGG | 14057 | GTATTTTTAGTAGAGACGGGG |
| 8393 | GUCAAACGAUCCAGACUGGAG | 14058 | GTCAAACGATCCAGACTGGAG |
| 8394 | GUCAAAGUUGAUGCUGUUGAU | 14059 | GTCAAAGTTGATGCTGTTGAT |
| 8395 | GUCAACCCAGUAGAGGCGGCC | 14060 | GTCAACCCAGTAGAGGCGGCC |
| 8396 | GUCAACCUGCCCCUCUCUGUC | 14061 | GTCAACCTGCCCCTCTCTGTC |
| 8397 | GUCAAGCUGGGUGCUGCAGAU | 14062 | GTCAAGCTGGGTGCTGCAGAT |
| 8398 | GUCACACAGCUGCCCCCGAGA | 14063 | GTCACACAGCTGCCCCCGAGA |
| 8399 | GUCACACUGCCGGCUGCCAUG | 14064 | GTCACACTGCCGGCTGCCATG |
| 8400 | GUCACAGACGAACUGCCGAGA | 14065 | GTCACAGACGAACTGCCGAGA |
| 8401 | GUCACAUUAACGCAGCCAACU | 14066 | GTCACATTAACGCAGCCAACT |
| 8402 | GUCACCAGCGAGUAGAUGUCC | 14067 | GTCACCAGCGAGTAGATGTCC |
| 8403 | GUCACGGUGGAGAGAAACUCA | 14068 | GTCACGGTGGAGAGAAACTCA |
| 8404 | GUCACUAUCUCCACCGUGGUG | 14069 | GTCACTATCTCCACCGTGGTG |
| 8405 | GUCACUGAACAAAUACAGCAA | 14070 | GTCACTGAACAAATACAGCAA |
| 8406 | GUCACUGUCUCUCCGGACAUC | 14071 | GTCACTGTCTCTCCGGACATC |
| 8407 | GUCAGACAGCCUUGCUCGUCU | 14072 | GTCAGACAGCCTTGCTCGTCT |
| 8408 | GUCAGACCAGUAGAUUCUAUU | 14073 | GTCAGACCAGTAGATTCTATT |
| 8409 | GUCAGAUUUGUCCUUGCAGUC | 14074 | GTCAGATTTGTCCTTGCAGTC |
| 8410 | GUCAGGGCGACAGGUGGCCAC | 14075 | GTCAGGGCGACAGGTGGCCAC |
| 8411 | GUCAGUCCAGUACAUGAAGCC | 14076 | GTCAGTCCAGTACATGAAGCC |
| 8412 | GUCAUAGGAAGAGACGCCGUG | 14077 | GTCATAGGAAGAGACGCCGTG |
| 8413 | GUCAUAUUCCCGGUCACACUG | 14078 | GTCATATTCCCGGTCACACTG |
| 8414 | GUCAUCCUCCAGACUGACCAU | 14079 | GTCATCCTCCAGACTGACCAT |
| 8415 | GUCAUCCUGGUCCCCCCGGGC | 14080 | GTCATCCTGGTCCCCCCGGGC |
| 8416 | GUCAUCUUCCUGACCUCGUGC | 14081 | GTCATCTTCCTGACCTCGTGC |
| 8417 | GUCAUGAUUCGGGGGUGACAG | 14082 | GTCATGATTCGGGGGTGACAG |
| 8418 | GUCAUUGCAGACGUGGGAACA | 14083 | GTCATTGCAGACGTGGGAACA |
| 8419 | GUCCAAAAUACUUUGUCCUCA | 14084 | GTCCAAAATACTTTGTCCTCA |
| 8420 | GUCCAAGCAGUCCCGGUCUGA | 14085 | GTCCAAGCAGTCCCGGTCTGA |
| 8421 | GUCCAAGCAUUCGUUGGUCCC | 14086 | GTCCAAGCATTCGTTGGTCCC |
| 8422 | GUCCACACCAUUCAGGCCCCC | 14087 | GTCCACACCATTCAGGCCCCC |
| 8423 | GUCCACAGCCAGCCCGUCGGG | 14088 | GTCCACAGCCAGCCCGTCGGG |
| 8424 | GUCCACUUGGCCAUCGCACCU | 14089 | GTCCACTTGGCCATCGCACCT |
| 8425 | GUCCAGAGCGACCACGUUCCU | 14090 | GTCCAGAGCGACCACGTTCCT |
| 8426 | GUCCAGCGCAAUUUCCAGCCC | 14091 | GTCCAGCGCAATTTCCAGCCC |
| 8427 | GUCCAGCGUCAUCUUCCUGAC | 14092 | GTCCAGCGTCATCTTCCTGAC |
| 8428 | GUCCAGCUGGAAGCCUUCCUC | 14093 | GTCCAGCTGGAAGCCTTCCTC |
| 8429 | GUCCAGGGUGAUGCAUUCGCC | 14094 | GTCCAGGGTGATGCATTCGCC |
| 8430 | GUCCAGUACAUGAAGCCAUGA | 14095 | GTCCAGTACATGAAGCCATGA |
| 8431 | GUCCAGUAGAUGUUGCUGUGG | 14096 | GTCCAGTAGATGTTGCTGTGG |
| 8432 | GUCCAGUUCGUGCAAAUAAUC | 14097 | GTCCAGTTCGTGCAAATAATC |
| 8433 | GUCCCCCCGGGCCUGUUUCUC | 14098 | GTCCCCCCGGGCCTGTTTCTC |
| 8434 | GUCCCCGCCGCGGCGAGGAGC | 14099 | GTCCCCGCCGCGGCGAGGAGC |
| 8435 | GUCCCCGGAUUUGCAGGUGAC | 14100 | GTCCCCGGATTTGCAGGTGAC |
| 8436 | GUCCCCGGCAUUCAUUGACAC | 14101 | GTCCCCGGCATTCATTGACAC |
| 8437 | GUCCCCUUGGAACACGUAAAG | 14102 | GTCCCCTTGGAACACGTAAAG |
| 8438 | GUCCCGACCCGGAUCACGACC | 14103 | GTCCCGACCCGGATCACGACC |
| 8439 | GUCCCGCACUCUUUGAUGGGU | 14104 | GTCCCGCACTCTTTGATGGGT |
| 8440 | GUCCCGGCAGUCUCUAGCCAU | 14105 | GTCCCGGCAGTCTCTAGCCAT |
| 8441 | GUCCCGGUCAACCUGCCCCUC | 14106 | GTCCCGGTCAACCTGCCCCTC |
| 8442 | GUCCCGGUCUGAGUCACAGAC | 14107 | GTCCCGGTCTGAGTCACAGAC |
| 8443 | GUCCCGUCAAACGAUCCAGAC | 14108 | GTCCCGTCAAACGATCCAGAC |
| 8444 | GUCCCGUUGGUGCCAUCUGCU | 14109 | GTCCCGTTGGTGCCATCTGCT |
| 8445 | GUCCCUCGCAGAGUGUCACAU | 14110 | GTCCCTCGCAGAGTGTCACAT |
| 8446 | GUCCCUCGCAGAGUGUCAGAC | 14111 | GTCCCTCGCAGAGTGTCAGAC |
| 8447 | GUCCCUGGCCAGCAGCAUGCC | 14112 | GTCCCTGGCCAGCAGCATGCC |
| 8448 | GUCCCUGGGGACAAUUGCCAA | 14113 | GTCCCTGGGGACAATTGCCAA |
| 8449 | GUCCGAAGCCUGUUCUGCCUC | 14114 | GTCCGAAGCCTGTTCTGCCTC |
| 8450 | GUCCGGGCAGGCGCAGGUAAA | 14115 | GTCCGGGCAGGCGCAGGTAAA |
| 8451 | GUCCUAGCUGGAAACCCUGGC | 14116 | GTCCTAGCTGGAAACCCTGGC |
| 8452 | GUCCUCAAAGACGGCCAAGGA | 14117 | GTCCTCAAAGACGGCCAAGGA |
| 8453 | GUCCUCACGGCCAAGGUAACC | 14118 | GTCCTCACGGCCAAGGTAACC |
| 8454 | GUCCUCUCACACCAGUUCACU | 14119 | GTCCTCTCACACCAGTTCACT |
| 8455 | GUCCUGACAGCCACACCUGGG | 14120 | GTCCTGACAGCCACACCTGGG |
| 8456 | GUCCUGGGAGCACGUCUUGGG | 14121 | GTCCTGGGAGCACGTCTTGGG |
| 8457 | GUCCUGGUUGUGGCAAAUGUG | 14122 | GTCCTGGTTGTGGCAAATGTG |
| 8458 | GUCCUUACGGCUGUGGAGCUG | 14123 | GTCCTTACGGCTGTGGAGCTG |
| 8459 | GUCCUUGCAGUCAUAUUCCCG | 14124 | GTCCTTGCAGTCATATTCCCG |
| 8460 | GUCCUUGCAGUCGGGGCCACC | 14125 | GTCCTTGCAGTCGGGGCCACC |
| 8461 | GUCGCAGGCCCACAGCUGGGG | 14126 | GTCGCAGGCCCACAGCTGGGG |
| 8462 | GUCGCAGUCCACUUGGCCAUC | 14127 | GTCGCAGTCCACTTGGCCATC |
| 8463 | GUCGCCACAGAGCACAGCGGA | 14128 | GTCGCCACAGAGCACAGCGGA |
| 8464 | GUCGCCCACGUGGCUGAAGAU | 14129 | GTCGCCCACGTGGCTGAAGAT |
| 8465 | GUCGCCCACUGCAGUCCCCGC | 14130 | GTCGCCCACTGCAGTCCCCGC |
| 8466 | GUCGCCCAGAGCUUGGUGAGA | 14131 | GTCGCCCAGAGCTTGGTGAGA |
| 8467 | GUCGCCCAGGCCAGACUGCGG | 14132 | GTCGCCCAGGCCAGACTGCGG |
| 8468 | GUCGCCUUUGUGACAGGAACC | 14133 | GTCGCCTTTGTGACAGGAACC |
| 8469 | GUCGCGGAGGCGGCUCCGGGG | 14134 | GTCGCGGAGGCGGCTCCGGGG |
| 8470 | GUCGGGAACAGGUCGGGUGGU | 14135 | GTCGGGAACAGGTCGGGTGGT |
| 8471 | GUCGGGAGGAUGGGCACCAGG | 14136 | GTCGGGAGGATGGGCACCAGG |
| 8472 | GUCGGGAUCCUGACACUCAUC | 14137 | GTCGGGATCCTGACACTCATC |
| 8473 | GUCGGGGCACAGGCACUCGUA | 14138 | GTCGGGGCACAGGCACTCGTA |
| 8474 | GUCGGGGCCACCAUCACAGCG | 14139 | GTCGGGGCCACCATCACAGCG |
| 8475 | GUCGGGGGCCUGGAUGUCUCU | 14140 | GTCGGGGGCCTGGATGTCTCT |
| 8476 | GUCGGGGUCGUUGUCGCAGGC | 14141 | GTCGGGGTCGTTGTCGCAGGC |
| 8477 | GUCGGGUGGUUGUGUGCUGUG | 14142 | GTCGGGTGGTTGTGTGCTGTG |
| 8478 | GUCGGUCCAGUAGAUGUUGCU | 14143 | GTCGGTCCAGTAGATGTTGCT |
| 8479 | GUCGUCGCCUUUGUGACAGGA | 14144 | GTCGTCGCCTTTGTGACAGGA |
| 8480 | GUCGUUGUCGCAGGCCCACAG | 14145 | GTCGTTGTCGCAGGCCCACAG |
| 8481 | GUCUAGCAAGGCUUGCAUAGA | 14146 | GTCTAGCAAGGCTTGCATAGA |
| 8482 | GUCUCAGGAAGGGUUCUGGGC | 14147 | GTCTCAGGAAGGGTTCTGGGC |
| 8483 | GUCUCAGGCACUUAAUAAAUA | 14148 | GTCTCAGGCACTTAATAAATA |
| 8484 | GUCUCCAACUCCUGAACUCAA | 14149 | GTCTCCAACTCCTGAACTCAA |
| 8485 | GUCUCCUGGGACUCAUCAGAG | 14150 | GTCTCCTGGGACTCATCAGAG |
| 8486 | GUCUCCUGGGUGGCCACUGCA | 14151 | GTCTCCTGGGTGGCCACTGCA |
| 8487 | GUCUCGAGGGGUAGCUGUAGC | 14152 | GTCTCGAGGGGTAGCTGTAGC |
| 8488 | GUCUCGAUCUCCUGACCUCAU | 14153 | GTCTCGATCTCCTGACCTCAT |
| 8489 | GUCUCGCUCUGUCGCCCAGGC | 14154 | GTCTCGCTCTGTCGCCCAGGC |
| 8490 | GUCUCGGUGCCACCACGGAUU | 14155 | GTCTCGGTGCCACCACGGATT |
| 8491 | GUCUCUAGCCAUGUUGCAGAC | 14156 | GTCTCTAGCCATGTTGCAGAC |
| 8492 | GUCUCUCCGGACAUCAGUGCA | 14157 | GTCTCTCCGGACATCAGTGCA |
| 8493 | GUCUCUGCUGAUGACGGUGUC | 14158 | GTCTCTGCTGATGACGGTGTC |
| 8494 | GUCUGACGGAGGCUGUCACUG | 14159 | GTCTGACGGAGGCTGTCACTG |
| 8495 | GUCUGAGCCGUCCAAGCAGUC | 14160 | GTCTGAGCCGTCCAAGCAGTC |
| 8496 | GUCUGAGCCGUUGUCGCAGUC | 14161 | GTCTGAGCCGTTGTCGCAGTC |
| 8497 | GUCUGAGUCACAGACGAACUG | 14162 | GTCTGAGTCACAGACGAACTG |
| 8498 | GUCUGGCCAAAUUCAUUUUUU | 14163 | GTCTGGCCAAATTCATTTTTT |
| 8499 | GUCUUACUAUGUUGCCCAGGC | 14164 | GTCTTACTATGTTGCCCAGGC |
| 8500 | GUCUUCAUCUGUUGCCCAGGC | 14165 | GTCTTCATCTGTTGCCCAGGC |
| 8501 | GUCUUCCGGUUGCCCCCGUUG | 14166 | GTCTTCCGGTTGCCCCCGTTG |
| 8502 | GUCUUCUCUGUCUUUGAAUAA | 14167 | GTCTTCTCTGTCTTTGAATAA |
| 8503 | GUCUUCUGAUAGACGGGGUUG | 14168 | GTCTTCTGATAGACGGGGTTG |
| 8504 | GUCUUGGCACUGGAACUCGUU | 14169 | GTCTTGGCACTGGAACTCGTT |
| 8505 | GUCUUGGGGGAGCACGUCUCC | 14170 | GTCTTGGGGGAGCACGTCTCC |
| 8506 | GUCUUGGGGGGACAGCCUUGC | 14171 | GTCTTGGGGGGACAGCCTTGC |
| 8507 | GUCUUUGAAUAAAACAAGGCC | 14172 | GTCTTTGAATAAAACAAGGCC |
| 8508 | GUGAACUUGAUCGGGGCUGGU | 14173 | GTGAACTTGATCGGGGCTGGT |
| 8509 | GUGAAGAAGAGGUAGGCGAUG | 14174 | GTGAAGAAGAGGTAGGCGATG |
| 8510 | GUGAAGUUUGGAGUCAACCCA | 14175 | GTGAAGTTTGGAGTCAACCCA |
| 8511 | GUGAAUGAGUUUGGUCUCGGU | 14176 | GTGAATGAGTTTGGTCTCGGT |
| 8512 | GUGAAUGGCUUGGAGGCAUUU | 14177 | GTGAATGGCTTGGAGGCATTT |
| 8513 | GUGACACCCAUCUCCCAGAAG | 14178 | GTGACACCCATCTCCCAGAAG |
| 8514 | GUGACACUUGAACUUGUUGGG | 14179 | GTGACACTTGAACTTGTTGGG |
| 8515 | GUGACAGACAAGCACGUCUCC | 14180 | GTGACAGACAAGCACGTCTCC |
| 8516 | GUGACAGGAACCGCGGAGGAA | 14181 | GTGACAGGAACCGCGGAGGAA |
| 8517 | GUGACAGGGCAAAGGCUAACC | 14182 | GTGACAGGGCAAAGGCTAACC |
| 8518 | GUGACAUCUUCACGCGGGAGU | 14183 | GTGACATCTTCACGCGGGAGT |
| 8519 | GUGACCAGUGACUCAGGCUCU | 14184 | GTGACCAGTGACTCAGGCTCT |
| 8520 | GUGACUCAGGCUCUGCCUCUG | 14185 | GTGACTCAGGCTCTGCCTCTG |
| 8521 | GUGAGACAUUGUCACUAUCUC | 14186 | GTGAGACATTGTCACTATCTC |
| 8522 | GUGAGCACCGGGCAGGAGGCC | 14187 | GTGAGCACCGGGCAGGAGGCC |
| 8523 | GUGAGCCACUGCGCCCGGCCU | 14188 | GTGAGCCACTGCGCCCGGCCT |
| 8524 | GUGAGCCCAGGGGUGGCCCCA | 14189 | GTGAGCCCAGGGGTGGCCCCA |
| 8525 | GUGAGGCACCUGUGUCUGGCC | 14190 | GTGAGGCACCTGTGTCTGGCC |
| 8526 | GUGAGGCAGCUCCUCAUGUCC | 14191 | GTGAGGCAGCTCCTCATGTCC |
| 8527 | GUGAGGCGGUUGGCACUGAAA | 14192 | GTGAGGCGGTTGGCACTGAAA |
| 8528 | GUGAGGUUGUGGAAGAGAACC | 14193 | GTGAGGTTGTGGAAGAGAACC |
| 8529 | GUGAUAACAGUUUCAACCAAU | 14194 | GTGATAACAGTTTCAACCAAT |
| 8530 | GUGAUCCAGCUCAGCCUCCCA | 14195 | GTGATCCAGCTCAGCCTCCCA |
| 8531 | GUGAUGCAUUCGCCGCUGUGA | 14196 | GTGATGCATTCGCCGCTGTGA |
| 8532 | GUGAUGCCAUUGGGCCACUGA | 14197 | GTGATGCCATTGGGCCACTGA |
| 8533 | GUGCAAAAUAAUAACACAAAU | 14198 | GTGCAAAATAATAACACAAAT |
| 8534 | GUGCAAACAUAACAAAAAAUC | 14199 | GTGCAAACATAACAAAAAATC |
| 8535 | GUGCAAAUAAUCUUUGUACAU | 14200 | GTGCAAATAATCTTTGTACAT |
| 8536 | GUGCAACAGUAACACGGCGAU | 14201 | GTGCAACAGTAACACGGCGAT |
| 8537 | GUGCAAGGAGACCACGGGAAU | 14202 | GTGCAAGGAGACCACGGGAAT |
| 8538 | GUGCAGGCCACGUGUCCUCAC | 14203 | GTGCAGGCCACGTGTCCTCAC |
| 8539 | GUGCAGUGGCUCGAUCAUGGC | 14204 | GTGCAGTGGCTCGATCATGGC |
| 8540 | GUGCAUGUUUUAAACACAUAC | 14205 | GTGCATGTTTTAAACACATAC |
| 8541 | GUGCCACCACGGAUUCAGCCA | 14206 | GTGCCACCACGGATTCAGCCA |
| 8542 | GUGCCACCGUACCCAGCUGAU | 14207 | GTGCCACCGTACCCAGCTGAT |
| 8543 | GUGCCAUCUGCUGUUGUGUGU | 14208 | GTGCCATCTGCTGTTGTGTGT |
| 8544 | GUGCCCAGGACAGAGUCGGUC | 14209 | GTGCCCAGGACAGAGTCGGTC |
| 8545 | GUGCCCGCCACCACGCCCGGC | 14210 | GTGCCCGCCACCACGCCCGGC |
| 8546 | GUGCCGGUUGGUGAAGAAGAG | 14211 | GTGCCGGTTGGTGAAGAAGAG |
| 8547 | GUGCUCCGAAACCAGAAAGGC | 14212 | GTGCTCCGAAACCAGAAAGGC |
| 8548 | GUGCUGCAGAUCAUUCUCUGG | 14213 | GTGCTGCAGATCATTCTCTGG |
| 8549 | GUGCUGGGAUUACAGGCGUGA | 14214 | GTGCTGGGATTACAGGCGTGA |
| 8550 | GUGCUGUGUCCUUACGGCUGU | 14215 | GTGCTGTGTCCTTACGGCTGT |
| 8551 | GUGGAACUCGAAGGCCGAGCA | 14216 | GTGGAACTCGAAGGCCGAGCA |
| 8552 | GUGGAAGAGAACCAUAUCCUC | 14217 | GTGGAAGAGAACCATATCCTC |
| 8553 | GUGGAAGCACUAGGUGGGGG | 14218 | GTGGAAGCACTAGGTGGGCGG |
| 8554 | GUGGACCUCAUCCUCUGUGGU | 14219 | GTGGACCTCATCCTCTGTGGT |
| 8555 | GUGGAGAGAAACUCAAAACUU | 14220 | GTGGAGAGAAACTCAAAACTT |
| 8556 | GUGGAGCUGACCUUUAGCCUG | 14221 | GTGGAGCTGACCTTTAGCCTG |
| 8557 | GUGGAGCUGUUGCACUGGAAG | 14222 | GTGGAGCTGTTGCACTGGAAG |
| 8558 | GUGGAUCCAGUCCACAGCCAG | 14223 | GTGGATCCAGTCCACAGCCAG |
| 8559 | GUGGAUGAGGCAGGGCCAGGG | 14224 | GTGGATGAGGCAGGGCCAGGG |
| 8560 | GUGGAUGCACUCGCCACUUAG | 14225 | GTGGATGCACTCGCCACTTAG |
| 8561 | GUGGAUGUCUCCUGGGUGGCC | 14226 | GTGGATGTCTCCTGGGTGGCC |
| 8562 | GUGGCAAAUGUGGACCUCAUC | 14227 | GTGGCAAATGTGGACCTCATC |
| 8563 | GUGGCAGCGAAACUCGUCCUG | 14228 | GTGGCAGCGAAACTCGTCCTG |
| 8564 | GUGGCAUAAUCAUAGCUCACG | 14229 | GTGGCATAATCATAGCTCACG |
| 8565 | GUGGCAUCAUUUGGUGAAUGA | 14230 | GTGGCATCATTTGGTGAATGA |
| 8566 | GUGGCCACAGCGCAGUUUUCC | 14231 | GTGGCCACAGCGCAGTTTTCC |
| 8567 | GUGGCCACAGGACAGCCUUGC | 14232 | GTGGCCACAGGACAGCCTTGC |
| 8568 | GUGGCCACUGCAGCCUCAGCC | 14233 | GTGGCCACTGCAGCCTCAGCC |
| 8569 | GUGGCCCCAGGCAGCCGGGAG | 14234 | GTGGCCCCAGGCAGCCGGGAG |
| 8570 | GUGGCCGGGGGCCCCUCUGUG | 14235 | GTGGCCGGGGGCCCCTCTGTG |
| 8571 | GUGGCGAUGGGGAGGACAAUG | 14236 | GTGGCGATGGGGAGGACAATG |
| 8572 | GUGGCGCAAUCUCGGCUCACU | 14237 | GTGGCGCAATCTCGGCTCACT |
| 8573 | GUGGCUCGAUCAUGGCUCACU | 14238 | GTGGCTCGATCATGGCTCACT |
| 8574 | GUGGCUGAAGAUCUCGGCUGC | 14239 | GTGGCTGAAGATCTCGGCTGC |
| 8575 | GUGGGAACAGCCGCCGUUGUU | 14240 | GTGGGAACAGCCGCCGTTGTT |
| 8576 | GUGGGCCAGCCUCUUUUCAUC | 14241 | GTGGGCCAGCCTCTTTTCATC |
| 8577 | GUGGGCGGACAUAAAGACGAC | 14242 | GTGGGCGGACATAAAGACGAC |
| 8578 | GUGGGCUCUGUCAAGCUGGGU | 14243 | GTGGGCTCTGTCAAGCTGGGT |
| 8579 | GUGGGGACGGAGGUGUCGCCA | 14244 | GTGGGGACGGAGGTGTCGCCA |
| 8580 | GUGGGGCGAGGGCGCCCCCCA | 14245 | GTGGGGCGAGGGCGCCCCCCA |
| 8581 | GUGGGGGUCCAGCUGGAAGCC | 14246 | GTGGGGGTCCAGCTGGAAGCC |
| 8582 | GUGGGGGUUGAUCUGCGGGGC | 14247 | GTGGGGGTTGATCTGCGGGGC |
| 8583 | GUGGGUAGGGGUCGGGAGGAU | 14248 | GTGGGTAGGGGTCGGGAGGAT |
| 8584 | GUGGGUCAUGAUUCGGGGGUG | 14249 | GTGGGTCATGATTCGGGGGTG |
| 8585 | GUGGUCCUCUCACACCAGUUC | 14250 | GTGGTCCTCTCACACCAGTTC |
| 8586 | GUGGUCUUCUGAUAGACGGGG | 14251 | GTGGTCTTCTGATAGACGGGG |
| 8587 | GUGGUGAGCCCAGGGGUGGCC | 14252 | GTGGTGAGCCCAGGGGTGGCC |
| 8588 | GUGGUUGUGUGCUGUGUCCUU | 14253 | GTGGTTGTGTGCTGTGTCCTT |
| 8589 | GUGGUUUAAAAAGUGACACCC | 14254 | GTGGTTTAAAAAGTGACACCC |
| 8590 | GUGUACAACUCUGAACUGAGA | 14255 | GTGTACAACTCTGAACTGAGA |
| 8591 | GUGUACUCGCUCCGGUCCAGC | 14256 | GTGTACTCGCTCCGGTCCAGC |
| 8592 | GUGUAUAUAUAUAUAUAUAAG | 14257 | GTGTATATATATATATATAAG |
| 8593 | GUGUAUGUCGCGGAGGCGGCU | 14258 | GTGTATGTCGCGGAGGCGGCT |
| 8594 | GUGUCACAUUAACGCAGCCAA | 14259 | GTGTCACATTAACGCAGCCAA |
| 8595 | GUGUCACGGUGGAGAGAAACU | 14260 | GTGTCACGGTGGAGAGAAACT |
| 8596 | GUGUCAGACAGCCUUGCUCGU | 14261 | GTGTCAGACAGCCTTGCTCGT |
| 8597 | GUGUCAUAGGAAGAGACGCCG | 14262 | GTGTCATAGGAAGAGACGCCG |
| 8598 | GUGUCAUCCUGGUCCCCCCGG | 14263 | GTGTCATCCTGGTCCCCCCGG |
| 8599 | GUGUCCAGAGCGACCACGUUC | 14264 | GTGTCCAGAGCGACCACGTTC |
| 8600 | GUGUCCCGACCCGGAUCACGA | 14265 | GTGTCCCGACCCGGATCACGA |
| 8601 | GUGUCCUAGCUGGAAACCCUG | 14266 | GTGTCCTAGCTGGAAACCCTG |
| 8602 | GUGUCCUCACGGCCAAGGUAA | 14267 | GTGTCCTCACGGCCAAGGTAA |
| 8603 | GUGUCCUGACAGCCACACCUG | 14268 | GTGTCCTGACAGCCACACCTG |
| 8604 | GUGUCCUUACGGCUGUGGAGC | 14269 | GTGTCCTTACGGCTGTGGAGC |
| 8605 | GUGUCGCCACAGAGCACAGCG | 14270 | GTGTCGCCACAGAGCACAGCG |
| 8606 | GUGUCGGGAACAGGUCGGGUG | 14271 | GTGTCGGGAACAGGTCGGGTG |
| 8607 | GUGUCGGGAUCCUGACACUCA | 14272 | GTGTCGGGATCCTGACACTCA |
| 8608 | GUGUCUCAGGCACUUAAUAAA | 14273 | GTGTCTCAGGCACTTAATAAA |
| 8609 | GUGUCUGGCCAAAUUCAUUUU | 14274 | GTGTCTGGCCAAATTCATTTT |
| 8610 | GUGUGCUGUGUCCUUACGGCU | 14275 | GTGTGCTGTGTCCTTACGGCT |
| 8611 | GUGUGGGGGUCCAGCUGGAAG | 14276 | GTGTGGGGGTCCAGCTGGAAG |
| 8612 | GUGUGUAUAUAUAUAUAUAUA | 14277 | GTGTGTATATATATATATATA |
| 8613 | GUGUGUUGAAAGCCACUUGCU | 14278 | GTGTGTTGAAAGCCACTTGCT |
| 8614 | GUGUUAGCCAGGAUGGUCUCG | 14279 | GTGTTAGCCAGGATGGTCTCG |
| 8615 | GUGUUGAAAGCCACUUGCUUC | 14280 | GTGTTGAAAGCCACTTGCTTC |
| 8616 | GUGUUUUGUCCCUGGGGACAA | 14281 | GTGTTTTGTCCCTGGGGACAA |
| 8617 | GUUAGCCAGGAUGGUCUCGAU | 14282 | GTTAGCCAGGATGGTCTCGAT |
| 8618 | GUUCACACCAUUCUCCUGCCU | 14283 | GTTCACACCATTCTCCTGCCT |
| 8619 | GUUCACGCAGAGCUGGCUGCA | 14284 | GTTCACGCAGAGCTGGCTGCA |
| 8620 | GUUCACGCCACGUCAUCCUCC | 14285 | GTTCACGCCACGTCATCCTCC |
| 8621 | GUUCACUCCUCUUGGCUGGGU | 14286 | GTTCACTCCTCTTGGCTGGGT |
| 8622 | GUUCAUCUGACCAGUCCCGGC | 14287 | GTTCATCTGACCAGTCCCGGC |
| 8623 | GUUCAUUUAAGAAAUUUAAUU | 14288 | GTTCATTTAAGAAATTTAATT |
| 8624 | GUUCCCCAGUCAGUCCAGUAC | 14289 | GTTCCCCAGTCAGTCCAGTAC |
| 8625 | GUUCCCUGCACUGGGGGGGAC | 14290 | GTTCCCTGCACTGGGGGGGAC |
| 8626 | GUUCCUCAGGUUGGGGAUGAG | 14291 | GTTCCTCAGGTTGGGGATGAG |
| 8627 | GUUCGUGCAAAUAAUCUUUGU | 14292 | GTTCGTGCAAATAATCTTTGT |
| 8628 | GUUCUCCCUGAAUAACGUUUU | 14293 | GTTCTCCCTGAATAACGTTTT |
| 8629 | GUUCUCGAUAUUCACGAUCAC | 14294 | GTTCTCGATATTCACGATCAC |
| 8630 | GUUCUGCCUCCCAGAUGAAUA | 14295 | GTTCTGCCTCCCAGATGAATA |
| 8631 | GUUCUGGGCAGGGACGGGACU | 14296 | GTTCTGGGCAGGGACGGGACT |
| 8632 | GUUCUUAAGCCGCCAGUUCUU | 14297 | GTTCTTAAGCCGCCAGTTCTT |
| 8633 | GUUCUUCCAUAGAAGGAAGAC | 14298 | GTTCTTCCATAGAAGGAAGAC |
| 8634 | GUUGAAAGCCACUUGCUUCUC | 14299 | GTTGAAAGCCACTTGCTTCTC |
| 8635 | GUUGACACGGCCCCCACAGCU | 14300 | GTTGACACGGCCCCCACAGCT |
| 8636 | GUUGACAUCGAUGCUUGAGAU | 14301 | GTTGACATCGATGCTTGAGAT |
| 8637 | GUUGACAUCGGAACCUGUGAG | 14302 | GTTGACATCGGAACCTGTGAG |
| 8638 | GUUGACUCCUGAGUUUAGGGG | 14303 | GTTGACTCCTGAGTTTAGGGG |
| 8639 | GUUGAUCUGCGGGGCAGGGAG | 14304 | GTTGATCTGCGGGGCAGGGAG |
| 8640 | GUUGAUGAUAUCUGUCCAAAA | 14305 | GTTGATGATATCTGTCCAAAA |
| 8641 | GUUGAUGCUGUUGAUGUUCUU | 14306 | GTTGATGCTGTTGATGTTCTT |
| 8642 | GUUGAUGUUCUUAAGCCGCCA | 14307 | GTTGATGTTCTTAAGCCGCCA |
| 8643 | GUUGCACACAGUCCAGUUCGU | 14308 | GTTGCACACAGTCCAGTTCGT |
| 8644 | GUUGCACUGGAAGCUGGCGGG | 14309 | GTTGCACTGGAAGCTGGCGGG |
| 8645 | GUUGCAGACUUUGUCCAGGGU | 14310 | GTTGCAGACTTTGTCCAGGGT |
| 8646 | GUUGCCCAGGCUGGAAAGCAG | 14311 | GTTGCCCAGGCTGGAAAGCAG |
| 8647 | GUUGCCCAGGCUGGAGUGCAG | 14312 | GTTGCCCAGGCTGGAGTGCAG |
| 8648 | GUUGCCCCCGUUGACAUCGAU | 14313 | GTTGCCCCCGTTGACATCGAT |
| 8649 | GUUGCUCAGGCCUGGUCUCCA | 14314 | GTTGCTCAGGCCTGGTCTCCA |
| 8650 | GUUGCUGUGGAUCCAGUCCAC | 14315 | GTTGCTGTGGATCCAGTCCAC |
| 8651 | GUUGGCACUGAAAAUGGCUUC | 14316 | GTTGGCACTGAAAATGGCTTC |
| 8652 | GUUGGGGAUGAGGCUGGUGUA | 14317 | GTTGGGGATGAGGCTGGTGTA |
| 8653 | GUUGGGUCCCUCGCAGAGUGU | 14318 | GTTGGGTCCCTCGCAGAGTGT |
| 8654 | GUUGGUCCCGCACUCUUUGAU | 14319 | GTTGGTCCCGCACTCTTTGAT |
| 8655 | GUUGGUGAAGAAGAGGUAGGC | 14320 | GTTGGTGAAGAAGAGGTAGGC |
| 8656 | GUUGGUGCCAUCUGCUGUUGU | 14321 | GTTGGTGCCATCTGCTGTTGT |
| 8657 | GUUGUAUUUCUGAAAUAGGGU | 14322 | GTTGTATTTCTGAAATAGGGT |
| 8658 | GUUGUCAAAGUUGAUGCUGUU | 14323 | GTTGTCAAAGTTGATGCTGTT |
| 8659 | GUUGUCCAAGCAUUCGUUGGU | 14324 | GTTGTCCAAGCATTCGTTGGT |
| 8660 | GUUGUCGCAGGCCCACAGCUG | 14325 | GTTGTCGCAGGCCCACAGCTG |
| 8661 | GUUGUCGCAGUCCACUUGGCC | 14326 | GTTGTCGCAGTCCACTTGGCC |
| 8662 | GUUGUGGAAGAGAACCAUAUC | 14327 | GTTGTGGAAGAGAACCATATC |
| 8663 | GUUGUGGCAAAUGUGGACCUC | 14328 | GTTGTGGCAAATGTGGACCTC |
| 8664 | GUUGUGUGCUGUGUCCUUACG | 14329 | GTTGTGTGCTGTGTCCTTACG |
| 8665 | GUUGUGUGUUGAAAGCCACUU | 14330 | GTTGTGTGTTGAAAGCCACTT |
| 8666 | GUUGUUGUCCAAGCAUUCGUU | 14331 | GTTGTTGTCCAAGCATTCGTT |
| 8667 | GUUUAAAAAGUGACACCCAUC | 14332 | GTTTAAAAAGTGACACCCATC |
| 8668 | GUUUAGGGGUUUGGCUUAGAG | 14333 | GTTTAGGGGTTTGGCTTAGAG |
| 8669 | GUUUCAACCAAUAUACAAAGU | 14334 | GTTTCAACCAATATACAAAGT |
| 8670 | GUUUCAACCUCGUAAGGAACC | 14335 | GTTTCAACCTCGTAAGGAACC |
| 8671 | GUUUCACGUGUUAGCCAGGAU | 14336 | GTTTCACGTGTTAGCCAGGAT |
| 8672 | GUUUCCAUCAGAGCACUGGAA | 14337 | GTTTCCATCAGAGCACTGGAA |
| 8673 | GUUUCUCUUAUCCUUCACGAG | 14338 | GTTTCTCTTATCCTTCACGAG |
| 8674 | GUUUCUUUCGCAUCUGUCGCC | 14339 | GTTTCTTTCGCATCTGTCGCC |
| 8675 | GUUUGAGGAUUGUGUCACGGU | 14340 | GTTTGAGGATTGTGTCACGGT |
| 8676 | GUUUGCAAAAAUAAAUAGAUU | 14341 | GTTTGCAAAAATAAATAGATT |
| 8677 | GUUUGGAGUCAACCCAGUAGA | 14342 | GTTTGGAGTCAACCCAGTAGA |
| 8678 | GUUUGGCUUAGAGAUUGGUGG | 14343 | GTTTGGCTTAGAGATTGGTGG |
| 8679 | GUUUGGUCUCGGUGCCACCAC | 14344 | GTTTGGTCTCGGTGCCACCAC |
| 8680 | GUUUUAAACACAUACCCAUCA | 14345 | GTTTTAAACACATACCCATCA |
| 8681 | GUUUUCAGCCAACAAGUUGAC | 14346 | GTTTTCAGCCAACAAGTTGAC |
| 8682 | GUUUUCAGUCACCAGCGAGUA | 14347 | GTTTTCAGTCACCAGCGAGTA |
| 8683 | GUUUUCCUCGUCAGAUUUGUC | 14348 | GTTTTCCTCGTCAGATTTGTC |
| 8684 | GUUUUCCUCUUCACGCCCUUG | 14349 | GTTTTCCTCTTCACGCCCTTG |
| 8685 | GUUUUGUCCCUGGGGACAAUU | 14350 | GTTTTGTCCCTGGGGACAATT |
| 8686 | GUUUUUGUAGAGAUGGGAUCU | 14351 | GTTTTTGTAGAGATGGGATCT |
| 8687 | GUUUUUUUUUGUUUUUUUUUU | 14352 | GTTTTTTTTTGTTTTTTTTTT |
| 8688 | GUUUUUUUUUUUUGAGACGGA | 14353 | GTTTTTTTTTTTTGAGACGGA |
| 8689 | UAAAAAGUGACACCCAUCUCC | 14354 | TAAAAAGTGACACCCATCTCC |
| 8690 | UAAAACAAAGCUCUGGCAGGC | 14355 | TAAAACAAAGCTCTGGCAGGC |
| 8691 | UAAAACAAGGCCGGCGAGGUC | 14356 | TAAAACAAGGCCGGCGAGGTC |
| 8692 | UAAACACAUACCCAUCAACGA | 14357 | TAAACACATACCCATCAACGA |
| 8693 | UAAACACGUUGACUCCUGAGU | 14358 | TAAACACGTTGACTCCTGAGT |
| 8694 | UAAACUUGGGCGAGUGGGGGU | 14359 | TAAACTTGGGCGAGTGGGGGT |
| 8695 | UAAAGAAGAGGCAUUUCAGAG | 14360 | TAAAGAAGAGGCATTTCAGAG |
| 8696 | UAAAGACCCCUACAGCGCUGC | 14361 | TAAAGACCCCTACAGCGCTGC |
| 8697 | UAAAGACGACAAUGGCAGUUC | 14362 | TAAAGACGACAATGGCAGTTC |
| 8698 | UAAAUAGAUUUUAUAUAUAUG | 14363 | TAAATAGATTTTATATATATG |
| 8699 | UAAAUAUAUAAAACAAAGCUC | 14364 | TAAATATATAAAACAAAGCTC |
| 8700 | UAAAUAUUAAGGGUGACCAGU | 14365 | TAAATATTAAGGGTGACCAGT |
| 8701 | UAACAAAAAAUCCCCACUAUC | 14366 | TAACAAAAAATCCCCACTATC |
| 8702 | UAACACAAAUGCCAAAUGUAC | 14367 | TAACACAAATGCCAAATGTAC |
| 8703 | UAACACGGCGAUUUCAGAAAG | 14368 | TAACACGGCGATTTCAGAAAG |
| 8704 | UAACAGUUUCAACCAAUAUAC | 14369 | TAACAGTTTCAACCAATATAC |
| 8705 | UAACCCCCUACACAGGGCCCC | 14370 | TAACCCCCTACACAGGGCCCC |
| 8706 | UAACCGGGUGUCUCAGGCACU | 14371 | TAACCGGGTGTCTCAGGCACT |
| 8707 | UAACCUGGCUGUCUAGCAAGG | 14372 | TAACCTGGCTGTCTAGCAAGG |
| 8708 | UAACGCAGCCAACUUCAUCGC | 14373 | TAACGCAGCCAACTTCATCGC |
| 8709 | UAACGGAGGGCGACUCGUGUA | 14374 | TAACGGAGGGCGACTCGTGTA |
| 8710 | UAACGUUUUCCUCUUCACGCC | 14375 | TAACGTTTTCCTCTTCACGCC |
| 8711 | UAACUUUUUGGUUUUUGUAGA | 14376 | TAACTTTTTGGTTTTTGTAGA |
| 8712 | UAAGAAAUUUAAUUGAUCACA | 14377 | TAAGAAATTTAATTGATCACA |
| 8713 | UAAGACAUUCAGGCUACAAAA | 14378 | TAAGACATTCAGGCTACAAAA |
| 8714 | UAAGAGAUGGGGUCUUACUAU | 14379 | TAAGAGATGGGGTCTTACTAT |
| 8715 | UAAGCCGCCAGUUCUUCCAUA | 14380 | TAAGCCGCCAGTTCTTCCATA |
| 8716 | UAAGGAACCGAGGCCUUGAGG | 14381 | TAAGGAACCGAGGCCTTGAGG |
| 8717 | UAAGGAAGGUACAAACCCACC | 14382 | TAAGGAAGGTACAAACCCACC |
| 8718 | UAAGGGUGACCAGUGACUCAG | 14383 | TAAGGGTGACCAGTGACTCAG |
| 8719 | UAAGGUCAUUGCAGACGUGGG | 14384 | TAAGGTCATTGCAGACGTGGG |
| 8720 | UAAGUGAUAACAGUUUCAACC | 14385 | TAAGTGATAACAGTTTCAACC |
| 8721 | UAAUAAAUAUUAAGGGUGACC | 14386 | TAATAAATATTAAGGGTGACC |
| 8722 | UAAUAACACAAAUGCCAAAUG | 14387 | TAATAACACAAATGCCAAATG |
| 8723 | UAAUCAUAGCUCACGACAGCC | 14388 | TAATCATAGCTCACGACAGCC |
| 8724 | UAAUCUUUGUACAUAAAGAAG | 14389 | TAATCTTTGTACATAAAGAAG |
| 8725 | UAAUUGAUCACAGUAAGACAU | 14390 | TAATTGATCACAGTAAGACAT |
| 8726 | UAAUUUUUUGUAUUUUUAGUA | 14391 | TAATTTTTTGTATTTTTAGTA |
| 8727 | UACAAAAACCUUCUAUACAGU | 14392 | TACAAAAACCTTCTATACAGT |
| 8728 | UACAAACCCACCUCGAAAGAC | 14393 | TACAAACCCACCTCGAAAGAC |
| 8729 | UACAAAGUGCAAACAUAACAA | 14394 | TACAAAGTGCAAACATAACAA |
| 8730 | UACAACGGGGACAUCAUUCUC | 14395 | TACAACGGGGACATCATTCTC |
| 8731 | UACAACUCUGAACUGAGAAAG | 14396 | TACAACTCTGAACTGAGAAAG |
| 8732 | UACACAGGGCCCCGAGAAUAG | 14397 | TACACAGGGCCCCGAGAATAG |
| 8733 | UACACAGUGUACAACUCUGAA | 14398 | TACACAGTGTACAACTCTGAA |
| 8734 | UACAGCAACCAGGGUUUGCAA | 14399 | TACAGCAACCAGGGTTTGCAA |
| 8735 | UACAGCGCUGCGGCCACUCAU | 14400 | TACAGCGCTGCGGCCACTCAT |
| 8736 | UACAGGCGUGAGCCACUGCGC | 14401 | TACAGGCGTGAGCCACTGCGC |
| 8737 | UACAGGCGUGAGGCACCUGUG | 14402 | TACAGGCGTGAGGCACCTGTG |
| 8738 | UACAGGGACGCAUUUACGUGC | 14403 | TACAGGGACGCATTTACGTGC |
| 8739 | UACAGGUGCCCGCCACCACGC | 14404 | TACAGGTGCCCGCCACCACGC |
| 8740 | UACAGUGGUUUAAAAAGUGAC | 14405 | TACAGTGGTTTAAAAAGTGAC |
| 8741 | UACAUAAAGAAGAGGCAUUUC | 14406 | TACATAAAGAAGAGGCATTTC |
| 8742 | UACAUACAACGGGGACAUCAU | 14407 | TACATACAACGGGGACATCAT |
| 8743 | UACAUGAAGCCAUGAACAGGA | 14408 | TACATGAAGCCATGAACAGGA |
| 8744 | UACCCAGCUGAUUUUUAACUU | 14409 | TACCCAGCTGATTTTTAACTT |
| 8745 | UACCCAUCAACGACAAGAUUG | 14410 | TACCCATCAACGACAAGATTG |
| 8746 | UACGGCUGUGGAGCUGACCUU | 14411 | TACGGCTGTGGAGCTGACCTT |
| 8747 | UACGUGCUCCGAAACCAGAAA | 14412 | TACGTGCTCCGAAACCAGAAA |
| 8748 | UACUAUGUUGCCCAGGCUGGA | 14413 | TACTATGTTGCCCAGGCTGGA |
| 8749 | UACUCGCUCCGGUCCAGCGUC | 14414 | TACTCGCTCCGGTCCAGCGTC |
| 8750 | UACUGGCAGCCGCCAUUGCUC | 14415 | TACTGGCAGCCGCCATTGCTC |
| 8751 | UACUGGGCUUCUUCUCAUUUC | 14416 | TACTGGGCTTCTTCTCATTTC |
| 8752 | UACUGUCCCCUUGGAACACGU | 14417 | TACTGTCCCCTTGGAACACGT |
| 8753 | UACUUUGUCCUCAAAGACGGC | 14418 | TACTTTGTCCTCAAAGACGGC |
| 8754 | UAGAAGAGGUAAACACGUUGA | 14419 | TAGAAGAGGTAAACACGTTGA |
| 8755 | UAGAAGGAAGACCCCCAGGCA | 14420 | TAGAAGGAAGACCCCCAGGCA |
| 8756 | UAGAAGUGGAAGCACUAGGUG | 14421 | TAGAAGTGGAAGCACTAGGTG |
| 8757 | UAGACGGGGUUGUCAAAGUUG | 14422 | TAGACGGGGTTGTCAAAGTTG |
| 8758 | UAGAGACGGGGUUUCACGUGU | 14423 | TAGAGACGGGGTTTCACGTGT |
| 8759 | UAGAGAUGGGAUCUCGCUUUG | 14424 | TAGAGATGGGATCTCGCTTTG |
| 8760 | UAGAGAUUGGUGGAUGAGGCA | 14425 | TAGAGATTGGTGGATGAGGCA |
| 8761 | UAGAGGCGGCCACUGAGGAGA | 14426 | TAGAGGCGGCCACTGAGGAGA |
| 8762 | UAGAUGUCCACACCAUUCAGG | 14427 | TAGATGTCCACACCATTCAGG |
| 8763 | UAGAUGUUGCUGUGGAUCCAG | 14428 | TAGATGTTGCTGTGGATCCAG |
| 8764 | UAGAUUCUAUUGCUGGCCACC | 14429 | TAGATTCTATTGCTGGCCACC |
| 8765 | UAGAUUUUAUAUAUAUGUGUG | 14430 | TAGATTTTATATATATGTGTG |
| 8766 | UAGCAAGGCUUGCAUAGAAGA | 14431 | TAGCAAGGCTTGCATAGAAGA |
| 8767 | UAGCCACCCUCCAGGUUCACG | 14432 | TAGCCACCCTCCAGGTTCACG |
| 8768 | UAGCCAGGAUGGUCUCGAUCU | 14433 | TAGCCAGGATGGTCTCGATCT |
| 8769 | UAGCCAUGUUGCAGACUUUGU | 14434 | TAGCCATGTTGCAGACTTTGT |
| 8770 | UAGCCGAUCUUAAGGUCAUUG | 14435 | TAGCCGATCTTAAGGTCATTG |
| 8771 | UAGCCGUCCUGGUUGUGGCAA | 14436 | TAGCCGTCCTGGTTGTGGCAA |
| 8772 | UAGCCUGACGGUGGAUGUCUC | 14437 | TAGCCTGACGGTGGATGTCTC |
| 8773 | UAGCUCACGACAGCCUCAAAU | 14438 | TAGCTCACGACAGCCTCAAAT |
| 8774 | UAGCUGGAAACCCUGGCUUCC | 14439 | TAGCTGGAAACCCTGGCTTCC |
| 8775 | UAGCUGGGACUACAGGUGCCC | 14440 | TAGCTGGGACTACAGGTGCCC |
| 8776 | UAGCUGGGAUCACAGGCACGU | 14441 | TAGCTGGGATCACAGGCACGT |
| 8777 | UAGCUGUAGCCGUCCUGGUUG | 14442 | TAGCTGTAGCCGTCCTGGTTG |
| 8778 | UAGGAAGAGACGCCGUGGGCU | 14443 | TAGGAAGAGACGCCGTGGGCT |
| 8779 | UAGGAGAUGCAUUUCCCGUCU | 14444 | TAGGAGATGCATTTCCCGTCT |
| 8780 | UAGGCAGUGGAACUCGAAGGC | 14445 | TAGGCAGTGGAACTCGAAGGC |
| 8781 | UAGGCGAUGGAGCCCACAGCC | 14446 | TAGGCGATGGAGCCCACAGCC |
| 8782 | UAGGGAGAGGCACGCUCUGUC | 14447 | TAGGGAGAGGCACGCTCTGTC |
| 8783 | UAGGGGUCGGGAGGAUGGGCA | 14448 | TAGGGGTCGGGAGGATGGGCA |
| 8784 | UAGGGGUUUGGCUUAGAGAUU | 14449 | TAGGGGTTTGGCTTAGAGATT |
| 8785 | UAGGGUCUUCAUCUGUUGCCC | 14450 | TAGGGTCTTCATCTGTTGCCC |
| 8786 | UAGGGUGAUGCCAUUGGGCCA | 14451 | TAGGGTGATGCCATTGGGCCA |
| 8787 | UAGGUGGGCGGACAUAAAGAC | 14452 | TAGGTGGGCGGACATAAAGAC |
| 8788 | UAGGUUUUCAGCCAACAAGUU | 14453 | TAGGTTTTCAGCCAACAAGTT |
| 8789 | UAGUAGAGACGGGGUUUCACG | 14454 | TAGTAGAGACGGGGTTTCACG |
| 8790 | UAGUCACUGAACAAAUACAGC | 14455 | TAGTCACTGAACAAATACAGC |
| 8791 | UAGUUGUAUUUCUGAAAUAGG | 14456 | TAGTTGTATTTCTGAAATAGG |
| 8792 | UAUAAAACAAAGCUCUGGCAG | 14457 | TATAAAACAAAGCTCTGGCAG |
| 8793 | UAUAAGUGAUAACAGUUUCAA | 14458 | TATAAGTGATAACAGTTTCAA |
| 8794 | UAUACAAAGUGCAAACAUAAC | 14459 | TATACAAAGTGCAAACATAAC |
| 8795 | UAUACAGUGGUUUAAAAAGUG | 14460 | TATACAGTGGTTTAAAAAGTG |
| 8796 | UAUAGUUGUAUUUCUGAAAUA | 14461 | TATAGTTGTATTTCTGAAATA |
| 8797 | UAUAUAAAACAAAGCUCUGGC | 14462 | TATATAAAACAAAGCTCTGGC |
| 8798 | UAUAUAAGUGAUAACAGUUUC | 14463 | TATATAAGTGATAACAGTTTC |
| 8799 | UAUAUAUAAGUGAUAACAGUU | 14464 | TATATATAAGTGATAACAGTT |
| 8800 | UAUAUAUAUAAGUGAUAACAG | 14465 | TATATATATAAGTGATAACAG |
| 8801 | UAUAUAUAUAUAAGUGAUAAC | 14466 | TATATATATATAAGTGATAAC |
| 8802 | UAUAUAUAUAUAUAAGUGAUA | 14467 | TATATATATATATAAGTGATA |
| 8803 | UAUAUAUAUAUAUAUAAGUGA | 14468 | TATATATATATATATAAGTGA |
| 8804 | UAUAUAUAUGUGUGUAUAUAU | 14469 | TATATATATGTGTGTATATAT |
| 8805 | UAUAUAUGUGUGUAUAUAUAU | 14470 | TATATATGTGTGTATATATAT |
| 8806 | UAUAUGUGUGUAUAUAUAUAU | 14471 | TATATGTGTGTATATATATAT |
| 8807 | UAUCACGGUUCCCUGCACUGG | 14472 | TATCACGGTTCCCTGCACTGG |
| 8808 | UAUCCGCAACAGAGACAGUGC | 14473 | TATCCGCAACAGAGACAGTGC |
| 8809 | UAUCCUCUGGGGACAGUAGGU | 14474 | TATCCTCTGGGGACAGTAGGT |
| 8810 | UAUCCUUCACGAGGAAAGGAA | 14475 | TATCCTTCACGAGGAAAGGAA |
| 8811 | UAUCGCACUCUUUGAUGGGUU | 14476 | TATCGCACTCTTTGATGGGTT |
| 8812 | UAUCUCCACCGUGGUGAGCCC | 14477 | TATCTCCACCGTGGTGAGCCC |
| 8813 | UAUCUGUACAGGGACGCAUUU | 14478 | TATCTGTACAGGGACGCATTT |
| 8814 | UAUCUGUCCAAAAUACUUUGU | 14479 | TATCTGTCCAAAATACTTTGT |
| 8815 | UAUCUUCGCAUCUUCGCUGGG | 14480 | TATCTTCGCATCTTCGCTGGG |
| 8816 | UAUGUCGCGGAGGCGGCUCCG | 14481 | TATGTCGCGGAGGCGGCTCCG |
| 8817 | UAUGUGUGUAUAUAUAUAUAU | 14482 | TATGTGTGTATATATATATAT |
| 8818 | UAUGUUGCCCAGGCUGGAAAG | 14483 | TATGTTGCCCAGGCTGGAAAG |
| 8819 | UAUUAAGGGUGACCAGUGACU | 14484 | TATTAAGGGTGACCAGTGACT |
| 8820 | UAUUCACGAUCACGGCUUUGA | 14485 | TATTCACGATCACGGCTTTGA |
| 8821 | UAUUCCCGGUCACACUGCCGG | 14486 | TATTCCCGGTCACACTGCCGG |
| 8822 | UAUUGCUGGCCACCUCCGUGU | 14487 | TATTGCTGGCCACCTCCGTGT |
| 8823 | UAUUUAUUUUUUUAUAGUUGU | 14488 | TATTTATTTTTTTATAGTTGT |
| 8824 | UAUUUCUGAAAUAGGGUCUUC | 14489 | TATTTCTGAAATAGGGTCTTC |
| 8825 | UAUUUUUAGUAGAGACGGGGU | 14490 | TATTTTTAGTAGAGACGGGGT |
| 8826 | UAUUUUUUUAUAGUUGUAUUU | 14491 | TATTTTTTTATAGTTGTATTT |
| 8827 | UCAAAACUUCCUGGAGAGAAA | 14492 | TCAAAACTTCCTGGAGAGAAA |
| 8828 | UCAAACCAUCCUCCCACCUCA | 14493 | TCAAACCATCCTCCCACCTCA |
| 8829 | UCAAACGAUCCAGACUGGAGG | 14494 | TCAAACGATCCAGACTGGAGG |
| 8830 | UCAAAGACGGCCAAGGAGAAG | 14495 | TCAAAGACGGCCAAGGAGAAG |
| 8831 | UCAAAGUUGAUGCUGUUGAUG | 14496 | TCAAAGTTGATGCTGTTGATG |
| 8832 | UCAAAUGCCUGAGCUCAAACC | 14497 | TCAAATGCCTGAGCTCAAACC |
| 8833 | UCAACCAAUAUACAAAGUGCA | 14498 | TCAACCAATATACAAAGTGCA |
| 8834 | UCAACCCAGUAGAGGCGGCCA | 14499 | TCAACCCAGTAGAGGCGGCCA |
| 8835 | UCAACCUCGUAAGGAACCGAG | 14500 | TCAACCTCGTAAGGAACCGAG |
| 8836 | UCAACCUGCCCCUCUCUGUCC | 14501 | TCAACCTGCCCCTCTCTGTCC |
| 8837 | UCAACGACAAGAUUGGGGAAG | 14502 | TCAACGACAAGATTGGGGAAG |
| 8838 | UCAAGCUGGGUGCUGCAGAUC | 14503 | TCAAGCTGGGTGCTGCAGATC |
| 8839 | UCAAGUGAUCCAGCUCAGCCU | 14504 | TCAAGTGATCCAGCTCAGCCT |
| 8840 | UCACACAGCUGCCCCCGAGAC | 14505 | TCACACAGCTGCCCCCGAGAC |
| 8841 | UCACACCAGUUCACUCCUCUU | 14506 | TCACACCAGTTCACTCCTCTT |
| 8842 | UCACACCAUUCUCCUGCCUCA | 14507 | TCACACCATTCTCCTGCCTCA |
| 8843 | UCACACUGCCGGCUGCCAUGG | 14508 | TCACACTGCCGGCTGCCATGG |
| 8844 | UCACACUGGCACUUGUAGCCA | 14509 | TCACACTGGCACTTGTAGCCA |
| 8845 | UCACAGACGAACUGCCGAGAG | 14510 | TCACAGACGAACTGCCGAGAG |
| 8846 | UCACAGCGCCAGCUGGAGUGG | 14511 | TCACAGCGCCAGCTGGAGTGG |
| 8847 | UCACAGGCACGUGCCACCGUA | 14512 | TCACAGGCACGTGCCACCGTA |
| 8848 | UCACAGUAAGACAUUCAGGCU | 14513 | TCACAGTAAGACATTCAGGCT |
| 8849 | UCACAUUAACGCAGCCAACUU | 14514 | TCACATTAACGCAGCCAACTT |
| 8850 | UCACCAGCGAGUAGAUGUCCA | 14515 | TCACCAGCGAGTAGATGTCCA |
| 8851 | UCACCGUGCAUGUUUUAAACA | 14516 | TCACCGTGCATGTTTTAAACA |
| 8852 | UCACGACAGCCUCAAAUGCCU | 14517 | TCACGACAGCCTCAAATGCCT |
| 8853 | UCACGACCUGCUGUGUCCUAG | 14518 | TCACGACCTGCTGTGTCCTAG |
| 8854 | UCACGAGGAAAGGAAGAAACC | 14519 | TCACGAGGAAAGGAAGAAACC |
| 8855 | UCACGAUCACGGCUUUGAAGU | 14520 | TCACGATCACGGCTTTGAAGT |
| 8856 | UCACGCAGAGCUGGCUGCAGG | 14521 | TCACGCAGAGCTGGCTGCAGG |
| 8857 | UCACGCCACGUCAUCCUCCAG | 14522 | TCACGCCACGTCATCCTCCAG |
| 8858 | UCACGCCCUUGGUAUCCGCAA | 14523 | TCACGCCCTTGGTATCCGCAA |
| 8859 | UCACGCGGGAGUCUGACGGAG | 14524 | TCACGCGGGAGTCTGACGGAG |
| 8860 | UCACGCUACUGGGCUUCUUCU | 14525 | TCACGCTACTGGGCTTCTTCT |
| 8861 | UCACGGCCAAGGUAACCGGGU | 14526 | TCACGGCCAAGGTAACCGGGT |
| 8862 | UCACGGCUUUGAAGUCCCGGU | 14527 | TCACGGCTTTGAAGTCCCGGT |
| 8863 | UCACGGUGGAGAGAAACUCAA | 14528 | TCACGGTGGAGAGAAACTCAA |
| 8864 | UCACGGUUCCCUGCACUGGGG | 14529 | TCACGGTTCCCTGCACTGGGG |
| 8865 | UCACGUGUUAGCCAGGAUGGU | 14530 | TCACGTGTTAGCCAGGATGGT |
| 8866 | UCACUAUCUCCACCGUGGUGA | 14531 | TCACTATCTCCACCGTGGTGA |
| 8867 | UCACUCCUCUUGGCUGGGUGA | 14532 | TCACTCCTCTTGGCTGGGTGA |
| 8868 | UCACUGAACAAAUACAGCAAC | 14533 | TCACTGAACAAATACAGCAAC |
| 8869 | UCACUGCAACCUCCACCUCCU | 14534 | TCACTGCAACCTCCACCTCCT |
| 8870 | UCACUGCAAGCUCCGCUUCCC | 14535 | TCACTGCAAGCTCCGCTTCCC |
| 8871 | UCACUGUCUCUCCGGACAUCA | 14536 | TCACTGTCTCTCCGGACATCA |
| 8872 | UCAGAAAGAACCUGAAGUCCC | 14537 | TCAGAAAGAACCTGAAGTCCC |
| 8873 | UCAGACAGCCUUGCUCGUCUG | 14538 | TCAGACAGCCTTGCTCGTCTG |
| 8874 | UCAGACCAGUAGAUUCUAUUG | 14539 | TCAGACCAGTAGATTCTATTG |
| 8875 | UCAGAGCACUGGAAUUCGUCA | 14540 | TCAGAGCACTGGAATTCGTCA |
| 8876 | UCAGAGCCAUCCUGGCACUCA | 14541 | TCAGAGCCATCCTGGCACTCA |
| 8877 | UCAGAGGCAAUAACCCCCUAC | 14542 | TCAGAGGCAATAACCCCCTAC |
| 8878 | UCAGAUUUGUCCUUGCAGUCG | 14543 | TCAGATTTGTCCTTGCAGTCG |
| 8879 | UCAGCCAACAAGUUGACAUCG | 14544 | TCAGCCAACAAGTTGACATCG |
| 8880 | UCAGCCAGAUCAUUUCCGACG | 14545 | TCAGCCAGATCATTTCCGACG |
| 8881 | UCAGCCUCCCAAAGUGCUGGG | 14546 | TCAGCCTCCCAAAGTGCTGGG |
| 8882 | UCAGCCUCCCAAGUAGCUGGG | 14547 | TCAGCCTCCCAAGTAGCTGGG |
| 8883 | UCAGCCUCCCGAGUAGCUGGG | 14548 | TCAGCCTCCCGAGTAGCTGGG |
| 8884 | UCAGCCUCGCCAUGCCUGGCC | 14549 | TCAGCCTCGCCATGCCTGGCC |
| 8885 | UCAGCCUCUCUUGGCUGGGUG | 14550 | TCAGCCTCTCTTGGCTGGGTG |
| 8886 | UCAGCCUCUGUGAGGCAGCUC | 14551 | TCAGCCTCTGTGAGGCAGCTC |
| 8887 | UCAGCGCUGCCAUCGCAGACC | 14552 | TCAGCGCTGCCATCGCAGACC |
| 8888 | UCAGGAAGGGUUCUGGGCAGG | 14553 | TCAGGAAGGGTTCTGGGCAGG |
| 8889 | UCAGGCACUUAAUAAAUAUUA | 14554 | TCAGGCACTTAATAAATATTA |
| 8890 | UCAGGCCCCCUUUCUUGAUCU | 14555 | TCAGGCCCCCTTTCTTGATCT |
| 8891 | UCAGGCCUGGUCUCCAACUCC | 14556 | TCAGGCCTGGTCTCCAACTCC |
| 8892 | UCAGGCGAUCCUCCUGCCUCA | 14557 | TCAGGCGATCCTCCTGCCTCA |
| 8893 | UCAGGCUACAAAAACCUUCUA | 14558 | TCAGGCTACAAAAACCTTCTA |
| 8894 | UCAGGCUCUGCCUCUGGGAAG | 14559 | TCAGGCTCTGCCTCTGGGAAG |
| 8895 | UCAGGGCGACAGGUGGCCACA | 14560 | TCAGGGCGACAGGTGGCCACA |
| 8896 | UCAGGGUGGUCCUCUCACACC | 14561 | TCAGGGTGGTCCTCTCACACC |
| 8897 | UCAGGUUGGGGAUGAGGCUGG | 14562 | TCAGGTTGGGGATGAGGCTGG |
| 8898 | UCAGUCACCAGCGAGUAGAUG | 14563 | TCAGTCACCAGCGAGTAGATG |
| 8899 | UCAGUCCAGUACAUGAAGCCA | 14564 | TCAGTCCAGTACATGAAGCCA |
| 8900 | UCAGUGCAACAGUAACACGGC | 14565 | TCAGTGCAACAGTAACACGGC |
| 8901 | UCAUACAUACAACGGGGACAU | 14566 | TCATACATACAACGGGGACAT |
| 8902 | UCAUAGCUCACGACAGCCUCA | 14567 | TCATAGCTCACGACAGCCTCA |
| 8903 | UCAUAGGAAGAGACGCCGUGG | 14568 | TCATAGGAAGAGACGCCGTGG |
| 8904 | UCAUAUUCCCGGUCACACUGC | 14569 | TCATATTCCCGGTCACACTGC |
| 8905 | UCAUCAGAGCCAUCCUGGCAC | 14570 | TCATCAGAGCCATCCTGGCAC |
| 8906 | UCAUCCGAGCCAUCUUCGCAG | 14571 | TCATCCGAGCCATCTTCGCAG |
| 8907 | UCAUCCUCCAAGAUGGUCUUC | 14572 | TCATCCTCCAAGATGGTCTTC |
| 8908 | UCAUCCUCCAGACUGACCAUC | 14573 | TCATCCTCCAGACTGACCATC |
| 8909 | UCAUCCUCUGUGGUCUUCUGA | 14574 | TCATCCTCTGTGGTCTTCTGA |
| 8910 | UCAUCCUGGUCCCCCCGGGCC | 14575 | TCATCCTGGTCCCCCCGGGCC |
| 8911 | UCAUCGAUAUCGCACUCUUUG | 14576 | TCATCGATATCGCACTCTTTG |
| 8912 | UCAUCGAUAUCUUCGCAUCUU | 14577 | TCATCGATATCTTCGCATCTT |
| 8913 | UCAUCGCUCAUGUCCUUGCAG | 14578 | TCATCGCTCATGTCCTTGCAG |
| 8914 | UCAUCUGACCAGUCCCGGCAG | 14579 | TCATCTGACCAGTCCCGGCAG |
| 8915 | UCAUCUGUUGCCCAGGCUGGA | 14580 | TCATCTGTTGCCCAGGCTGGA |
| 8916 | UCAUCUUCCAUGUUUGAGGAU | 14581 | TCATCTTCCATGTTTGAGGAT |
| 8917 | UCAUCUUCCUGACCUCGUGCC | 14582 | TCATCTTCCTGACCTCGTGCC |
| 8918 | UCAUGAUCCACCCGCCUCGGC | 14583 | TCATGATCCACCCGCCTCGGC |
| 8919 | UCAUGAUUCGGGGGUGACAGG | 14584 | TCATGATTCGGGGGTGACAGG |
| 8920 | UCAUGGCUCACUGCAACCUCC | 14585 | TCATGGCTCACTGCAACCTCC |
| 8921 | UCAUGUCCCUGGCCAGCAGCA | 14586 | TCATGTCCCTGGCCAGCAGCA |
| 8922 | UCAUGUCCUUGCAGUCAUAUU | 14587 | TCATGTCCTTGCAGTCATATT |
| 8923 | UCAUUCUCCCAAAAAGCGUUG | 14588 | TCATTCTCCCAAAAAGCGTTG |
| 8924 | UCAUUCUCUGGGACAGGUCAG | 14589 | TCATTCTCTGGGACAGGTCAG |
| 8925 | UCAUUGACACGGGCUUUCCCU | 14590 | TCATTGACACGGGCTTTCCCT |
| 8926 | UCAUUGCAGACGUGGGAACAG | 14591 | TCATTGCAGACGTGGGAACAG |
| 8927 | UCAUUUAAGAAAUUUAAUUGA | 14592 | TCATTTAAGAAATTTAATTGA |
| 8928 | UCAUUUCCGACGCCAUGAAUC | 14593 | TCATTTCCGACGCCATGAATC |
| 8929 | UCAUUUCCUCUGCCAGCAACG | 14594 | TCATTTCCTCTGCCAGCAACG |
| 8930 | UCAUUUGGUGAAUGAGUUUGG | 14595 | TCATTTGGTGAATGAGTTTGG |
| 8931 | UCAUUUUUUAAGAGAUGGGGU | 14596 | TCATTTTTTAAGAGATGGGGT |
| 8932 | UCCAAAAUACUUUGUCCUCAA | 14597 | TCCAAAATACTTTGTCCTCAA |
| 8933 | UCCAACUCCUGAACUCAAGUG | 14598 | TCCAACTCCTGAACTCAAGTG |
| 8934 | UCCAAGAUGGUCUUCCGGUUG | 14599 | TCCAAGATGGTCTTCCGGTTG |
| 8935 | UCCAAGCAGUCCCGGUCUGAG | 14600 | TCCAAGCAGTCCCGGTCTGAG |
| 8936 | UCCAAGCAUUCGUUGGUCCCG | 14601 | TCCAAGCATTCGTTGGTCCCG |
| 8937 | UCCACACCAUUCAGGCCCCCU | 14602 | TCCACACCATTCAGGCCCCCT |
| 8938 | UCCACAGCCAGCCCGUCGGGG | 14603 | TCCACAGCCAGCCCGTCGGGG |
| 8939 | UCCACCACGAUGGCCCUUGGC | 14604 | TCCACCACGATGGCCCTTGGC |
| 8940 | UCCACCCGCCUCGGCCUCCCA | 14605 | TCCACCCGCCTCGGCCTCCCA |
| 8941 | UCCACCGUGGUGAGCCCAGGG | 14606 | TCCACCGTGGTGAGCCCAGGG |
| 8942 | UCCACCUCCUGGGCUCAGGCG | 14607 | TCCACCTCCTGGGCTCAGGCG |
| 8943 | UCCACUUGGCCAUCGCACCUC | 14608 | TCCACTTGGCCATCGCACCTC |
| 8944 | UCCAGAACUGAGGAAUGCAGC | 14609 | TCCAGAACTGAGGAATGCAGC |
| 8945 | UCCAGACUGACCAUCGAGGGG | 14610 | TCCAGACTGACCATCGAGGGG |
| 8946 | UCCAGACUGACCAUCUGUCUC | 14611 | TCCAGACTGACCATCTGTCTC |
| 8947 | UCCAGACUGGAGGAUUUAUUU | 14612 | TCCAGACTGGAGGATTTATTT |
| 8948 | UCCAGAGCGACCACGUUCCUC | 14613 | TCCAGAGCGACCACGTTCCTC |
| 8949 | UCCAGCCCCAGGGCCCCAUGC | 14614 | TCCAGCCCCAGGGCCCCATGC |
| 8950 | UCCAGCGCAAUUUCCAGCCCC | 14615 | TCCAGCGCAATTTCCAGCCCC |
| 8951 | UCCAGCGUCAUCUUCCUGACC | 14616 | TCCAGCGTCATCTTCCTGACC |
| 8952 | UCCAGCUCAGCCUCCCAAAGU | 14617 | TCCAGCTCAGCCTCCCAAAGT |
| 8953 | UCCAGCUGGAAGCCUUCCUCA | 14618 | TCCAGCTGGAAGCCTTCCTCA |
| 8954 | UCCAGGCAGAUGUUCACGCCA | 14619 | TCCAGGCAGATGTTCACGCCA |
| 8955 | UCCAGGGUGAUGCAUUCGCCG | 14620 | TCCAGGGTGATGCATTCGCCG |
| 8956 | UCCAGGUUCACGCAGAGCUGG | 14621 | TCCAGGTTCACGCAGAGCTGG |
| 8957 | UCCAGUACAUGAAGCCAUGAA | 14622 | TCCAGTACATGAAGCCATGAA |
| 8958 | UCCAGUAGAUGUUGCUGUGGA | 14623 | TCCAGTAGATGTTGCTGTGGA |
| 8959 | UCCAGUCCACAGCCAGCCCGU | 14624 | TCCAGTCCACAGCCAGCCCGT |
| 8960 | UCCAGUUCGUGCAAAUAAUCU | 14625 | TCCAGTTCGTGCAAATAATCT |
| 8961 | UCCAUAGAAGGAAGACCCCCA | 14626 | TCCATAGAAGGAAGACCCCCA |
| 8962 | UCCAUCAGAGCACUGGAAUUC | 14627 | TCCATCAGAGCACTGGAATTC |
| 8963 | UCCAUGUUUGAGGAUUGUGUC | 14628 | TCCATGTTTGAGGATTGTGTC |
| 8964 | UCCCAAAAAGCGUUGCACACA | 14629 | TCCCAAAAAGCGTTGCACACA |
| 8965 | UCCCAAAGUGCUGGGAUUACA | 14630 | TCCCAAAGTGCTGGGATTACA |
| 8966 | UCCCAACACACACGACAGAAA | 14631 | TCCCAACACACACGACAGAAA |
| 8967 | UCCCAACCCAAGCCAUUGCAU | 14632 | TCCCAACCCAAGCCATTGCAT |
| 8968 | UCCCAAGUAGCUGGGAUCACA | 14633 | TCCCAAGTAGCTGGGATCACA |
| 8969 | UCCCACCUCAGCCUCGCCAUG | 14634 | TCCCACCTCAGCCTCGCCATG |
| 8970 | UCCCAGAAGCCACUCAUACAU | 14635 | TCCCAGAAGCCACTCATACAT |
| 8971 | UCCCAGAUGAAUAAAUAUAUA | 14636 | TCCCAGATGAATAAATATATA |
| 8972 | UCCCAUCCCAACACACACGAC | 14637 | TCCCATCCCAACACACACGAC |
| 8973 | UCCCAUCGUGGCAGCGAAACU | 14638 | TCCCATCGTGGCAGCGAAACT |
| 8974 | UCCCCACUAUCUGUACAGGGA | 14639 | TCCCCACTATCTGTACAGGGA |
| 8975 | UCCCCAGUCAGUCCAGUACAU | 14640 | TCCCCAGTCAGTCCAGTACAT |
| 8976 | UCCCCCCGGGCCUGUUUCUCU | 14641 | TCCCCCCGGGCCTGTTTCTCT |
| 8977 | UCCCCGCCGCGGCGAGGAGCA | 14642 | TCCCCGCCGCGGCGAGGAGCA |
| 8978 | UCCCCGGAUUUGCAGGUGACA | 14643 | TCCCCGGATTTGCAGGTGACA |
| 8979 | UCCCCGGCAUUCAUUGACACG | 14644 | TCCCCGGCATTCATTGACACG |
| 8980 | UCCCCUCCCCUUUCAUCUUCC | 14645 | TCCCCTCCCCTTTCATCTTCC |
| 8981 | UCCCCUUGGAACACGUAAAGA | 14646 | TCCCCTTGGAACACGTAAAGA |
| 8982 | UCCCCUUUCAUCUUCCAUGUU | 14647 | TCCCCTTTCATCTTCCATGTT |
| 8983 | UCCCGACCCGGAUCACGACCU | 14648 | TCCCGACCCGGATCACGACCT |
| 8984 | UCCCGAGUAGCUGGGACUACA | 14649 | TCCCGAGTAGCTGGGACTACA |
| 8985 | UCCCGCACUCUUUGAUGGGUU | 14650 | TCCCGCACTCTTTGATGGGTT |
| 8986 | UCCCGGCAGUCUCUAGCCAUG | 14651 | TCCCGGCAGTCTCTAGCCATG |
| 8987 | UCCCGGGUUCACACCAUUCUC | 14652 | TCCCGGGTTCACACCATTCTC |
| 8988 | UCCCGGUCAACCUGCCCCUCU | 14653 | TCCCGGTCAACCTGCCCCTCT |
| 8989 | UCCCGGUCACACUGCCGGCUG | 14654 | TCCCGGTCACACTGCCGGCTG |
| 8990 | UCCCGGUCUGAGUCACAGACG | 14655 | TCCCGGTCTGAGTCACAGACG |
| 8991 | UCCCGUCAAACGAUCCAGACU | 14656 | TCCCGTCAAACGATCCAGACT |
| 8992 | UCCCGUCUUGGCACUGGAACU | 14657 | TCCCGTCTTGGCACTGGAACT |
| 8993 | UCCCGUUGGUGCCAUCUGCUG | 14658 | TCCCGTTGGTGCCATCTGCTG |
| 8994 | UCCCUCGCAGAGUGUCACAUU | 14659 | TCCCTCGCAGAGTGTCACATT |
| 8995 | UCCCUCGCAGAGUGUCAGACA | 14660 | TCCCTCGCAGAGTGTCAGACA |
| 8996 | UCCCUGAAUAACGUUUUCCUC | 14661 | TCCCTGAATAACGTTTTCCTC |
| 8997 | UCCCUGCACUGGGGGGGACAC | 14662 | TCCCTGCACTGGGGGGGACAC |
| 8998 | UCCCUGGCCAGCAGCAUGCCG | 14663 | TCCCTGGCCAGCAGCATGCCG |
| 8999 | UCCCUGGCCUGGGAUCCCAUC | 14664 | TCCCTGGCCTGGGATCCCATC |
| 9000 | UCCCUGGGGACAAUUGCCAAU | 14665 | TCCCTGGGGACAATTGCCAAT |
| 9001 | UCCCUUGUGACAUCUUCACGC | 14666 | TCCCTTGTGACATCTTCACGC |
| 9002 | UCCCUUUCCUGGCUUAAGGAA | 14667 | TCCCTTTCCTGGCTTAAGGAA |
| 9003 | UCCGAAACCAGAAAGGCUUAU | 14668 | TCCGAAACCAGAAAGGCTTAT |
| 9004 | UCCGAAGCCUGUUCUGCCUCC | 14669 | TCCGAAGCCTGTTCTGCCTCC |
| 9005 | UCCGACGCCAUGAAUCCCUUU | 14670 | TCCGACGCCATGAATCCCTTT |
| 9006 | UCCGAGCCAUCUUCGCAGUCG | 14671 | TCCGAGCCATCTTCGCAGTCG |
| 9007 | UCCGCAACAGAGACAGUGCCC | 14672 | TCCGCAACAGAGACAGTGCCC |
| 9008 | UCCGCUUCCCGGGUUCACACC | 14673 | TCCGCTTCCCGGGTTCACACC |
| 9009 | UCCGGACAUCAGUGCAACAGU | 14674 | TCCGGACATCAGTGCAACAGT |
| 9010 | UCCGGGCAGGCGCAGGUAAAC | 14675 | TCCGGGCAGGCGCAGGTAAAC |
| 9011 | UCCGGGGACCCGGGACUUGUC | 14676 | TCCGGGGACCCGGGACTTGTC |
| 9012 | UCCGGUCCAGCGUCAUCUUCC | 14677 | TCCGGTCCAGCGTCATCTTCC |
| 9013 | UCCGGUUGCCCCCGUUGACAU | 14678 | TCCGGTTGCCCCCGTTGACAT |
| 9014 | UCCGUGGCGAUGGGGAGGACA | 14679 | TCCGTGGCGATGGGGAGGACA |
| 9015 | UCCGUGUCCAGAGCGACCACG | 14680 | TCCGTGTCCAGAGCGACCACG |
| 9016 | UCCUAGCUGGAAACCCUGGCU | 14681 | TCCTAGCTGGAAACCCTGGCT |
| 9017 | UCCUCAAAGACGGCCAAGGAG | 14682 | TCCTCAAAGACGGCCAAGGAG |
| 9018 | UCCUCACACUGGCACUUGUAG | 14683 | TCCTCACACTGGCACTTGTAG |
| 9019 | UCCUCACGGCCAAGGUAACCG | 14684 | TCCTCACGGCCAAGGTAACCG |
| 9020 | UCCUCAGGUUGGGGAUGAGGC | 14685 | TCCTCAGGTTGGGGATGAGGC |
| 9021 | UCCUCAUGUCCCUGGCCAGCA | 14686 | TCCTCATGTCCCTGGCCAGCA |
| 9022 | UCCUCCAAGAUGGUCUUCCGG | 14687 | TCCTCCAAGATGGTCTTCCGG |
| 9023 | UCCUCCAGACUGACCAUCGAG | 14688 | TCCTCCAGACTGACCATCGAG |
| 9024 | UCCUCCAGACUGACCAUCUGU | 14689 | TCCTCCAGACTGACCATCTGT |
| 9025 | UCCUCCCACCUCAGCCUCGCC | 14690 | TCCTCCCACCTCAGCCTCGCC |
| 9026 | UCCUCCUGCCUCAGCCUCCCA | 14691 | TCCTCCTGCCTCAGCCTCCCA |
| 9027 | UCCUCGUCAGAUUUGUCCUUG | 14692 | TCCTCGTCAGATTTGTCCTTG |
| 9028 | UCCUCUCACACCAGUUCACUC | 14693 | TCCTCTCACACCAGTTCACTC |
| 9029 | UCCUCUGCCAGCAACGUCGCC | 14694 | TCCTCTGCCAGCAACGTCGCC |
| 9030 | UCCUCUGGGGACAGUAGGUUU | 14695 | TCCTCTGGGGACAGTAGGTTT |
| 9031 | UCCUCUGUGGUCUUCUGAUAG | 14696 | TCCTCTGTGGTCTTCTGATAG |
| 9032 | UCCUCUUCACGCCCUUGGUAU | 14697 | TCCTCTTCACGCCCTTGGTAT |
| 9033 | UCCUCUUGGCUGGGUGAGGUU | 14698 | TCCTCTTGGCTGGGTGAGGTT |
| 9034 | UCCUGAACUCAAGUGAUCCAG | 14699 | TCCTGAACTCAAGTGATCCAG |
| 9035 | UCCUGACACUCAUCGAUAUCG | 14700 | TCCTGACACTCATCGATATCG |
| 9036 | UCCUGACACUCAUCGAUAUCU | 14701 | TCCTGACACTCATCGATATCT |
| 9037 | UCCUGACAGCCACACCUGGGU | 14702 | TCCTGACAGCCACACCTGGGT |
| 9038 | UCCUGACCUCAUGAUCCACCC | 14703 | TCCTGACCTCATGATCCACCC |
| 9039 | UCCUGACCUCGUGCCGGUUGG | 14704 | TCCTGACCTCGTGCCGGTTGG |
| 9040 | UCCUGAGUUUAGGGGUUUGGC | 14705 | TCCTGAGTTTAGGGGTTTGGC |
| 9041 | UCCUGCCUCAGCCUCCCAAGU | 14706 | TCCTGCCTCAGCCTCCCAAGT |
| 9042 | UCCUGCCUCAGCCUCCCGAGU | 14707 | TCCTGCCTCAGCCTCCCGAGT |
| 9043 | UCCUGGAGAGAAAUGGAGGUG | 14708 | TCCTGGAGAGAAATGGAGGTG |
| 9044 | UCCUGGCACUCAGCGCUGCCA | 14709 | TCCTGGCACTCAGCGCTGCCA |
| 9045 | UCCUGGCUUAAGGAAGGUACA | 14710 | TCCTGGCTTAAGGAAGGTACA |
| 9046 | UCCUGGGACUCAUCAGAGCCA | 14711 | TCCTGGGACTCATCAGAGCCA |
| 9047 | UCCUGGGAGCACGUCUUGGGG | 14712 | TCCTGGGAGCACGTCTTGGGG |
| 9048 | UCCUGGGCUCAGGCGAUCCUC | 14713 | TCCTGGGCTCAGGCGATCCTC |
| 9049 | UCCUGGGUGGCCACUGCAGCC | 14714 | TCCTGGGTGGCCACTGCAGCC |
| 9050 | UCCUGGUCCCCCCGGGCCUGU | 14715 | TCCTGGTCCCCCCGGGCCTGT |
| 9051 | UCCUGGUUGUGGCAAAUGUGG | 14716 | TCCTGGTTGTGGCAAATGTGG |
| 9052 | UCCUUACGGCUGUGGAGCUGA | 14717 | TCCTTACGGCTGTGGAGCTGA |
| 9053 | UCCUUCACGAGGAAAGGAAGA | 14718 | TCCTTCACGAGGAAAGGAAGA |
| 9054 | UCCUUGCAGUCAUAUUCCCGG | 14719 | TCCTTGCAGTCATATTCCCGG |
| 9055 | UCCUUGCAGUCGGGGCCACCA | 14720 | TCCTTGCAGTCGGGGCCACCA |
| 9056 | UCGAAAGACACUGGGUGGGUC | 14721 | TCGAAAGACACTGGGTGGGTC |
| 9057 | UCGAAGGCCGAGCAGGGGCUA | 14722 | TCGAAGGCCGAGCAGGGGCTA |
| 9058 | UCGAGGGGUAGCUGUAGCCGU | 14723 | TCGAGGGGTAGCTGTAGCCGT |
| 9059 | UCGAUAUCGCACUCUUUGAUG | 14724 | TCGATATCGCACTCTTTGATG |
| 9060 | UCGAUAUCUUCGCAUCUUCGC | 14725 | TCGATATCTTCGCATCTTCGC |
| 9061 | UCGAUAUUCACGAUCACGGCU | 14726 | TCGATATTCACGATCACGGCT |
| 9062 | UCGAUCAUGGCUCACUGCAAC | 14727 | TCGATCATGGCTCACTGCAAC |
| 9063 | UCGAUCUCCUGACCUCAUGAU | 14728 | TCGATCTCCTGACCTCATGAT |
| 9064 | UCGAUGCUUGAGAUGGAGUGA | 14729 | TCGATGCTTGAGATGGAGTGA |
| 9065 | UCGCACCUCCAGAACUGAGGA | 14730 | TCGCACCTCCAGAACTGAGGA |
| 9066 | UCGCACUCUUUGAUGGGUUCA | 14731 | TCGCACTCTTTGATGGGTTCA |
| 9067 | UCGCAGACCCACUUGUAGGAG | 14732 | TCGCAGACCCACTTGTAGGAG |
| 9068 | UCGCAGAGUGUCACAUUAACG | 14733 | TCGCAGAGTGTCACATTAACG |
| 9069 | UCGCAGAGUGUCAGACAGCCU | 14734 | TCGCAGAGTGTCAGACAGCCT |
| 9070 | UCGCAGCCUCUGCCAGGCAGU | 14735 | TCGCAGCCTCTGCCAGGCAGT |
| 9071 | UCGCAGGCCCACAGCUGGGGG | 14736 | TCGCAGGCCCACAGCTGGGGG |
| 9072 | UCGCAGUCCACUUGGCCAUCG | 14737 | TCGCAGTCCACTTGGCCATCG |
| 9073 | UCGCAGUCGGGGUCGUUGUCG | 14738 | TCGCAGTCGGGGTCGTTGTCG |
| 9074 | UCGCAUCUGUCGCCCACGUGG | 14739 | TCGCATCTGTCGCCCACGTGG |
| 9075 | UCGCAUCUGUCGCCCACUGCA | 14740 | TCGCATCTGTCGCCCACTGCA |
| 9076 | UCGCAUCUUCGCUGGGCCACC | 14741 | TCGCATCTTCGCTGGGCCACC |
| 9077 | UCGCCACAGAGCACAGCGGAA | 14742 | TCGCCACAGAGCACAGCGGAA |
| 9078 | UCGCCACUUAGGCAGUGGAAC | 14743 | TCGCCACTTAGGCAGTGGAAC |
| 9079 | UCGCCAGGAGGGCCCAGGAUA | 14744 | TCGCCAGGAGGGCCCAGGATA |
| 9080 | UCGCCAUGCCUGGCCAGAGGC | 14745 | TCGCCATGCCTGGCCAGAGGC |
| 9081 | UCGCCCACGUGGCUGAAGAUC | 14746 | TCGCCCACGTGGCTGAAGATC |
| 9082 | UCGCCCACUGCAGUCCCCGCC | 14747 | TCGCCCACTGCAGTCCCCGCC |
| 9083 | UCGCCCAGAGCUUGGUGAGAC | 14748 | TCGCCCAGAGCTTGGTGAGAC |
| 9084 | UCGCCCAGGCCAGACUGCGGA | 14749 | TCGCCCAGGCCAGACTGCGGA |
| 9085 | UCGCCGCUGUGACACUUGAAC | 14750 | TCGCCGCTGTGACACTTGAAC |
| 9086 | UCGCCUUUGUGACAGGAACCG | 14751 | TCGCCTTTGTGACAGGAACCG |
| 9087 | UCGCGGAGGCGGCUCCGGGGA | 14752 | TCGCGGAGGCGGCTCCGGGGA |
| 9088 | UCGCUCAUGUCCUUGCAGUCA | 14753 | TCGCTCATGTCCTTGCAGTCA |
| 9089 | UCGCUCCGGUCCAGCGUCAUC | 14754 | TCGCTCCGGTCCAGCGTCATC |
| 9090 | UCGCUCUGUCGCCCAGGCCAG | 14755 | TCGCTCTGTCGCCCAGGCCAG |
| 9091 | UCGCUGGGCCACCAGCUGGAA | 14756 | TCGCTGGGCCACCAGCTGGAA |
| 9092 | UCGCUUUGUUGCUCAGGCCUG | 14757 | TCGCTTTGTTGCTCAGGCCTG |
| 9093 | UCGGAACCUGUGAGGCGGUUG | 14758 | TCGGAACCTGTGAGGCGGTTG |
| 9094 | UCGGCCUCCCAAAGUGCUGGG | 14759 | TCGGCCTCCCAAAGTGCTGGG |
| 9095 | UCGGCUCACUGCAAGCUCCGC | 14760 | TCGGCTCACTGCAAGCTCCGC |
| 9096 | UCGGCUGCAGACCAAGGAGGG | 14761 | TCGGCTGCAGACCAAGGAGGG |
| 9097 | UCGGGAACAGGUCGGGUGGUU | 14762 | TCGGGAACAGGTCGGGTGGTT |
| 9098 | UCGGGAGGAUGGGCACCAGGC | 14763 | TCGGGAGGATGGGCACCAGGC |
| 9099 | UCGGGAUCCUGACACUCAUCG | 14764 | TCGGGATCCTGACACTCATCG |
| 9100 | UCGGGGCACAGGCACUCGUAG | 14765 | TCGGGGCACAGGCACTCGTAG |
| 9101 | UCGGGGCCACCAUCACAGCGC | 14766 | TCGGGGCCACCATCACAGCGC |
| 9102 | UCGGGGCUGGUGGGGCGAGGG | 14767 | TCGGGGCTGGTGGGGCGAGGG |
| 9103 | UCGGGGGCCUGGAUGUCUCUG | 14768 | TCGGGGGCCTGGATGTCTCTG |
| 9104 | UCGGGGGUGACAGGGCAAAGG | 14769 | TCGGGGGTGACAGGGCAAAGG |
| 9105 | UCGGGGUCGUUGUCGCAGGCC | 14770 | TCGGGGTCGTTGTCGCAGGCC |
| 9106 | UCGGGUGGUUGUGUGCUGUGU | 14771 | TCGGGTGGTTGTGTGCTGTGT |
| 9107 | UCGGUCCAGUAGAUGUUGCUG | 14772 | TCGGTCCAGTAGATGTTGCTG |
| 9108 | UCGGUGCCACCACGGAUUCAG | 14773 | TCGGTGCCACCACGGATTCAG |
| 9109 | UCGUAAGGAACCGAGGCCUUG | 14774 | TCGTAAGGAACCGAGGCCTTG |
| 9110 | UCGUAGCCGAUCUUAAGGUCA | 14775 | TCGTAGCCGATCTTAAGGTCA |
| 9111 | UCGUCAGAUUUGUCCUUGCAG | 14776 | TCGTCAGATTTGTCCTTGCAG |
| 9112 | UCGUCAGGGCGACAGGUGGCC | 14777 | TCGTCAGGGCGACAGGTGGCC |
| 9113 | UCGUCCUGGGAGCACGUCUUG | 14778 | TCGTCCTGGGAGCACGTCTTG |
| 9114 | UCGUCGCCUUUGUGACAGGAA | 14779 | TCGTCGCCTTTGTGACAGGAA |
| 9115 | UCGUCUGAGCCGUCCAAGCAG | 14780 | TCGTCTGAGCCGTCCAAGCAG |
| 9116 | UCGUCUGAGCCGUUGUCGCAG | 14781 | TCGTCTGAGCCGTTGTCGCAG |
| 9117 | UCGUGCAAAUAAUCUUUGUAC | 14782 | TCGTGCAAATAATCTTTGTAC |
| 9118 | UCGUGCCGGUUGGUGAAGAAG | 14783 | TCGTGCCGGTTGGTGAAGAAG |
| 9119 | UCGUGGCAGCGAAACUCGUCC | 14784 | TCGTGGCAGCGAAACTCGTCC |
| 9120 | UCGUGUAUGUCGCGGAGGCGG | 14785 | TCGTGTATGTCGCGGAGGCGG |
| 9121 | UCGUGUGGGGGUCCAGCUGGA | 14786 | TCGTGTGGGGGTCCAGCTGGA |
| 9122 | UCGUUGAUGAUAUCUGUCCAA | 14787 | TCGTTGATGATATCTGTCCAA |
| 9123 | UCGUUGGUCCCGCACUCUUUG | 14788 | TCGTTGGTCCCGCACTCTTTG |
| 9124 | UCGUUGUCGCAGGCCCACAGC | 14789 | TCGTTGTCGCAGGCCCACAGC |
| 9125 | UCGUUUCUUUCGCAUCUGUCG | 14790 | TCGTTTCTTTCGCATCTGTCG |
| 9126 | UCUAGCAAGGCUUGCAUAGAA | 14791 | TCTAGCAAGGCTTGCATAGAA |
| 9127 | UCUAGCCAUGUUGCAGACUUU | 14792 | TCTAGCCATGTTGCAGACTTT |
| 9128 | UCUAGGGUGAUGCCAUUGGGC | 14793 | TCTAGGGTGATGCCATTGGGC |
| 9129 | UCUAUACAGUGGUUUAAAAAG | 14794 | TCTATACAGTGGTTTAAAAAG |
| 9130 | UCUAUUGCUGGCCACCUCCGU | 14795 | TCTATTGCTGGCCACCTCCGT |
| 9131 | UCUCACACCAGUUCACUCCUC | 14796 | TCTCACACCAGTTCACTCCTC |
| 9132 | UCUCAGGAAGGGUUCUGGGCA | 14797 | TCTCAGGAAGGGTTCTGGGCA |
| 9133 | UCUCAGGCACUUAAUAAAUAU | 14798 | TCTCAGGCACTTAATAAATAT |
| 9134 | UCUCAUUUCCUCUGCCAGCAA | 14799 | TCTCATTTCCTCTGCCAGCAA |
| 9135 | UCUCCAACUCCUGAACUCAAG | 14800 | TCTCCAACTCCTGAACTCAAG |
| 9136 | UCUCCACCGUGGUGAGCCCAG | 14801 | TCTCCACCGTGGTGAGCCCAG |
| 9137 | UCUCCCAAAAAGCGUUGCACA | 14802 | TCTCCCAAAAAGCGTTGCACA |
| 9138 | UCUCCCAGAAGCCACUCAUAC | 14803 | TCTCCCAGAAGCCACTCATAC |
| 9139 | UCUCCCUGAAUAACGUUUUCC | 14804 | TCTCCCTGAATAACGTTTTCC |
| 9140 | UCUCCGGACAUCAGUGCAACA | 14805 | TCTCCGGACATCAGTGCAACA |
| 9141 | UCUCCUGACCUCAUGAUCCAC | 14806 | TCTCCTGACCTCATGATCCAC |
| 9142 | UCUCCUGCCUCAGCCUCCCGA | 14807 | TCTCCTGCCTCAGCCTCCCGA |
| 9143 | UCUCCUGGGACUCAUCAGAGC | 14808 | TCTCCTGGGACTCATCAGAGC |
| 9144 | UCUCCUGGGUGGCCACUGCAG | 14809 | TCTCCTGGGTGGCCACTGCAG |
| 9145 | UCUCGAGGGGUAGCUGUAGCC | 14810 | TCTCGAGGGGTAGCTGTAGCC |
| 9146 | UCUCGAUAUUCACGAUCACGG | 14811 | TCTCGATATTCACGATCACGG |
| 9147 | UCUCGAUCUCCUGACCUCAUG | 14812 | TCTCGATCTCCTGACCTCATG |
| 9148 | UCUCGCUCUGUCGCCCAGGCC | 14813 | TCTCGCTCTGTCGCCCAGGCC |
| 9149 | UCUCGCUUUGUUGCUCAGGCC | 14814 | TCTCGCTTTGTTGCTCAGGCC |
| 9150 | UCUCGGCUCACUGCAAGCUCC | 14815 | TCTCGGCTCACTGCAAGCTCC |
| 9151 | UCUCGGCUGCAGACCAAGGAG | 14816 | TCTCGGCTGCAGACCAAGGAG |
| 9152 | UCUCGGUGCCACCACGGAUUC | 14817 | TCTCGGTGCCACCACGGATTC |
| 9153 | UCUCUAGCCAUGUUGCAGACU | 14818 | TCTCTAGCCATGTTGCAGACT |
| 9154 | UCUCUCCGGACAUCAGUGCAA | 14819 | TCTCTCCGGACATCAGTGCAA |
| 9155 | UCUCUGCUGAUGACGGUGUCA | 14820 | TCTCTGCTGATGACGGTGTCA |
| 9156 | UCUCUGGGACAGGUCAGACCA | 14821 | TCTCTGGGACAGGTCAGACCA |
| 9157 | UCUCUGGGCCUGACAUCCCCU | 14822 | TCTCTGGGCCTGACATCCCCT |
| 9158 | UCUCUGUCCCCGGCAUUCAUU | 14823 | TCTCTGTCCCCGGCATTCATT |
| 9159 | UCUCUGUCUUUGAAUAAAACA | 14824 | TCTCTGTCTTTGAATAAAACA |
| 9160 | UCUCUUAUCCUUCACGAGGAA | 14825 | TCTCTTATCCTTCACGAGGAA |
| 9161 | UCUCUUGGCUGGGUGAGGUUG | 14826 | TCTCTTGGCTGGGTGAGGTTG |
| 9162 | UCUGAAAUAGGGUCUUCAUCU | 14827 | TCTGAAATAGGGTCTTCATCT |
| 9163 | UCUGAACUGAGAAAGUGCAAG | 14828 | TCTGAACTGAGAAAGTGCAAG |
| 9164 | UCUGACCAGUCCCGGCAGUCU | 14829 | TCTGACCAGTCCCGGCAGTCT |
| 9165 | UCUGACGGAGGCUGUCACUGU | 14830 | TCTGACGGAGGCTGTCACTGT |
| 9166 | UCUGAGCCGUCCAAGCAGUCC | 14831 | TCTGAGCCGTCCAAGCAGTCC |
| 9167 | UCUGAGCCGUUGUCGCAGUCC | 14832 | TCTGAGCCGTTGTCGCAGTCC |
| 9168 | UCUGAGGCAACGUUUCAACCU | 14833 | TCTGAGGCAACGTTTCAACCT |
| 9169 | UCUGAGUCACAGACGAACUGC | 14834 | TCTGAGTCACAGACGAACTGC |
| 9170 | UCUGAUAGACGGGGUUGUCAA | 14835 | TCTGATAGACGGGGTTGTCAA |
| 9171 | UCUGCCAGCAACGUCGCCCAG | 14836 | TCTGCCAGCAACGTCGCCCAG |
| 9172 | UCUGCCAGGCAGUGUCCCGAC | 14837 | TCTGCCAGGCAGTGTCCCGAC |
| 9173 | UCUGCCUCCCAGAUGAAUAAA | 14838 | TCTGCCTCCCAGATGAATAAA |
| 9174 | UCUGCCUCUGGGAAGUGGCAU | 14839 | TCTGCCTCTGGGAAGTGGCAT |
| 9175 | UCUGCGGGGCAGGGAGGCACA | 14840 | TCTGCGGGGCAGGGAGGCACA |
| 9176 | UCUGCUGAUGACGGUGUCAUA | 14841 | TCTGCTGATGACGGTGTCATA |
| 9177 | UCUGCUGUUGUGUGUUGAAAG | 14842 | TCTGCTGTTGTGTGTTGAAAG |
| 9178 | UCUGGCAGGCAAUGCUUUGGU | 14843 | TCTGGCAGGCAATGCTTTGGT |
| 9179 | UCUGGCCAAAUUCAUUUUUUA | 14844 | TCTGGCCAAATTCATTTTTTA |
| 9180 | UCUGGGAAGUGGCAUCAUUUG | 14845 | TCTGGGAAGTGGCATCATTTG |
| 9181 | UCUGGGACAGGUCAGACCAGU | 14846 | TCTGGGACAGGTCAGACCAGT |
| 9182 | UCUGGGCAGGGACGGGACUCC | 14847 | TCTGGGCAGGGACGGGACTCC |
| 9183 | UCUGGGCCUGACAUCCCCUCC | 14848 | TCTGGGCCTGACATCCCCTCC |
| 9184 | UCUGGGGACAGUAGGUUUUCA | 14849 | TCTGGGGACAGTAGGTTTTCA |
| 9185 | UCUGUACAGGGACGCAUUUAC | 14850 | TCTGTACAGGGACGCATTTAC |
| 9186 | UCUGUCAAGCUGGGUGCUGCA | 14851 | TCTGTCAAGCTGGGTGCTGCA |
| 9187 | UCUGUCACACAGCUGCCCCCG | 14852 | TCTGTCACACAGCTGCCCCCG |
| 9188 | UCUGUCCAAAAUACUUUGUCC | 14853 | TCTGTCCAAAATACTTTGTCC |
| 9189 | UCUGUCCCCGGCAUUCAUUGA | 14854 | TCTGTCCCCGGCATTCATTGA |
| 9190 | UCUGUCGCCCACGUGGCUGAA | 14855 | TCTGTCGCCCACGTGGCTGAA |
| 9191 | UCUGUCGCCCACUGCAGUCCC | 14856 | TCTGTCGCCCACTGCAGTCCC |
| 9192 | UCUGUCGCCCAGGCCAGACUG | 14857 | TCTGTCGCCCAGGCCAGACTG |
| 9193 | UCUGUCUCGAGGGGUAGCUGU | 14858 | TCTGTCTCGAGGGGTAGCTGT |
| 9194 | UCUGUCUUUGAAUAAAACAAG | 14859 | TCTGTCTTTGAATAAAACAAG |
| 9195 | UCUGUGAACUUGAUCGGGGCU | 14860 | TCTGTGAACTTGATCGGGGCT |
| 9196 | UCUGUGAGGCAGCUCCUCAUG | 14861 | TCTGTGAGGCAGCTCCTCATG |
| 9197 | UCUGUGGUCUUCUGAUAGACG | 14862 | TCTGTGGTCTTCTGATAGACG |
| 9198 | UCUGUUGCCCAGGCUGGAGUG | 14863 | TCTGTTGCCCAGGCTGGAGTG |
| 9199 | UCUUAAGCCGCCAGUUCUUCC | 14864 | TCTTAAGCCGCCAGTTCTTCC |
| 9200 | UCUUAAGGUCAUUGCAGACGU | 14865 | TCTTAAGGTCATTGCAGACGT |
| 9201 | UCUUACUAUGUUGCCCAGGCU | 14866 | TCTTACTATGTTGCCCAGGCT |
| 9202 | UCUUAUCCUUCACGAGGAAAG | 14867 | TCTTATCCTTCACGAGGAAAG |
| 9203 | UCUUCACGCCCUUGGUAUCCG | 14868 | TCTTCACGCCCTTGGTATCCG |
| 9204 | UCUUCACGCGGGAGUCUGACG | 14869 | TCTTCACGCGGGAGTCTGACG |
| 9205 | UCUUCAUCUGUUGCCCAGGCU | 14870 | TCTTCATCTGTTGCCCAGGCT |
| 9206 | UCUUCCAUAGAAGGAAGACCC | 14871 | TCTTCCATAGAAGGAAGACCC |
| 9207 | UCUUCCAUGUUUGAGGAUUGU | 14872 | TCTTCCATGTTTGAGGATTGT |
| 9208 | UCUUCCGGUUGCCCCCGUUGA | 14873 | TCTTCCGGTTGCCCCCGTTGA |
| 9209 | UCUUCCUGACCUCGUGCCGGU | 14874 | TCTTCCTGACCTCGTGCCGGT |
| 9210 | UCUUCGCAGUCGGGGUCGUUG | 14875 | TCTTCGCAGTCGGGGTCGTTG |
| 9211 | UCUUCGCAUCUUCGCUGGGCC | 14876 | TCTTCGCATCTTCGCTGGGCC |
| 9212 | UCUUCGCUGGGCCACCAGCUG | 14877 | TCTTCGCTGGGCCACCAGCTG |
| 9213 | UCUUCUCAUUUCCUCUGCCAG | 14878 | TCTTCTCATTTCCTCTGCCAG |
| 9214 | UCUUCUCUGUCUUUGAAUAAA | 14879 | TCTTCTCTGTCTTTGAATAAA |
| 9215 | UCUUCUGAUAGACGGGGUUGU | 14880 | TCTTCTGATAGACGGGGTTGT |
| 9216 | UCUUGAUCUUGGCGGGAGUUC | 14881 | TCTTGATCTTGGCGGGAGTTC |
| 9217 | UCUUGGCACUGGAACUCGUUU | 14882 | TCTTGGCACTGGAACTCGTTT |
| 9218 | UCUUGGCGGGAGUUCCCCAGU | 14883 | TCTTGGCGGGAGTTCCCCAGT |
| 9219 | UCUUGGCUGGGUGAGGUUGUG | 14884 | TCTTGGCTGGGTGAGGTTGTG |
| 9220 | UCUUGGGGGAGCACGUCUCCU | 14885 | TCTTGGGGGAGCACGTCTCCT |
| 9221 | UCUUGGGGGGACAGCCUUGCU | 14886 | TCTTGGGGGGACAGCCTTGCT |
| 9222 | UCUUUCGCAUCUGUCGCCCAC | 14887 | TCTTTCGCATCTGTCGCCCAC |
| 9223 | UCUUUGAAUAAAACAAGGCCG | 14888 | TCTTTGAATAAAACAAGGCCG |
| 9224 | UCUUUGAUGGGUUCAUCUGAC | 14889 | TCTTTGATGGGTTCATCTGAC |
| 9225 | UCUUUGUACAUAAAGAAGAGG | 14890 | TCTTTGTACATAAAGAAGAGG |
| 9226 | UCUUUUCAUCCUCCAAGAUGG | 14891 | TCTTTTCATCCTCCAAGATGG |
| 9227 | UGAAAAUGGCUUCGUUGAUGA | 14892 | TGAAAATGGCTTCGTTGATGA |
| 9228 | UGAAAGCCACUUGCUUCUCUG | 14893 | TGAAAGCCACTTGCTTCTCTG |
| 9229 | UGAAAUAGGGUCUUCAUCUGU | 14894 | TGAAATAGGGTCTTCATCTGT |
| 9230 | UGAACAAAUACAGCAACCAGG | 14895 | TGAACAAATACAGCAACCAGG |
| 9231 | UGAACAGGAUCCACCACGAUG | 14896 | TGAACAGGATCCACCACGATG |
| 9232 | UGAACUCAAGUGAUCCAGCUC | 14897 | TGAACTCAAGTGATCCAGCTC |
| 9233 | UGAACUGAGAAAGUGCAAGGA | 14898 | TGAACTGAGAAAGTGCAAGGA |
| 9234 | UGAACUUGAUCGGGGCUGGUG | 14899 | TGAACTTGATCGGGGCTGGTG |
| 9235 | UGAACUUGUUGGGUCCCUCGC | 14900 | TGAACTTGTTGGGTCCCTCGC |
| 9236 | UGAAGAAGAGGUAGGCGAUGG | 14901 | TGAAGAAGAGGTAGGCGATGG |
| 9237 | UGAAGAUCUCGGCUGCAGACC | 14902 | TGAAGATCTCGGCTGCAGACC |
| 9238 | UGAAGCCAUGAACAGGAUCCA | 14903 | TGAAGCCATGAACAGGATCCA |
| 9239 | UGAAGUCCCCGGAUUUGCAGG | 14904 | TGAAGTCCCCGGATTTGCAGG |
| 9240 | UGAAGUCCCGGUCAACCUGCC | 14905 | TGAAGTCCCGGTCAACCTGCC |
| 9241 | UGAAGUCCCGUCAAACGAUCC | 14906 | TGAAGTCCCGTCAAACGATCC |
| 9242 | UGAAGUUUGGAGUCAACCCAG | 14907 | TGAAGTTTGGAGTCAACCCAG |
| 9243 | UGAAUAAAACAAGGCCGGCGA | 14908 | TGAATAAAACAAGGCCGGCGA |
| 9244 | UGAAUAAAUAUAUAAAACAAA | 14909 | TGAATAAATATATAAAACAAA |
| 9245 | UGAAUAACGUUUUCCUCUUCA | 14910 | TGAATAACGTTTTCCTCTTCA |
| 9246 | UGAAUCCCUUUCCUGGCUUAA | 14911 | TGAATCCCTTTCCTGGCTTAA |
| 9247 | UGAAUGAGUUUGGUCUCGGUG | 14912 | TGAATGAGTTTGGTCTCGGTG |
| 9248 | UGAAUGGCUUGGAGGCAUUUG | 14913 | TGAATGGCTTGGAGGCATTTG |
| 9249 | UGAAUGUUUUCAGUCACCAGC | 14914 | TGAATGTTTTCAGTCACCAGC |
| 9250 | UGACACCCAUCUCCCAGAAGC | 14915 | TGACACCCATCTCCCAGAAGC |
| 9251 | UGACACGGCCCCCACAGCUGA | 14916 | TGACACGGCCCCCACAGCTGA |
| 9252 | UGACACGGGCUUUCCCUGGCC | 14917 | TGACACGGGCTTTCCCTGGCC |
| 9253 | UGACACUCAUCGAUAUCGCAC | 14918 | TGACACTCATCGATATCGCAC |
| 9254 | UGACACUCAUCGAUAUCUUCG | 14919 | TGACACTCATCGATATCTTCG |
| 9255 | UGACACUUGAACUUGUUGGGU | 14920 | TGACACTTGAACTTGTTGGGT |
| 9256 | UGACAGACAAGCACGUCUCCU | 14921 | TGACAGACAAGCACGTCTCCT |
| 9257 | UGACAGCCACACCUGGGUGCA | 14922 | TGACAGCCACACCTGGGTGCA |
| 9258 | UGACAGGAACCGCGGAGGAAC | 14923 | TGACAGGAACCGCGGAGGAAC |
| 9259 | UGACAGGGCAAAGGCUAACCU | 14924 | TGACAGGGCAAAGGCTAACCT |
| 9260 | UGACAUCCCCUCCCCUUUCAU | 14925 | TGACATCCCCTCCCCTTTCAT |
| 9261 | UGACAUCGAUGCUUGAGAUGG | 14926 | TGACATCGATGCTTGAGATGG |
| 9262 | UGACAUCGGAACCUGUGAGGC | 14927 | TGACATCGGAACCTGTGAGGC |
| 9263 | UGACAUCUUCACGCGGGAGUC | 14928 | TGACATCTTCACGCGGGAGTC |
| 9264 | UGACCAGUCCCGGCAGUCUCU | 14929 | TGACCAGTCCCGGCAGTCTCT |
| 9265 | UGACCAGUGACUCAGGCUCUG | 14930 | TGACCAGTGACTCAGGCTCTG |
| 9266 | UGACCAUCGAGGGGUAGCUGU | 14931 | TGACCATCGAGGGGTAGCTGT |
| 9267 | UGACCAUCUGUCUCGAGGGGU | 14932 | TGACCATCTGTCTCGAGGGGT |
| 9268 | UGACCUCAUGAUCCACCCGCC | 14933 | TGACCTCATGATCCACCCGCC |
| 9269 | UGACCUCGUGCCGGUUGGUGA | 14934 | TGACCTCGTGCCGGTTGGTGA |
| 9270 | UGACCUUUAGCCUGACGGUGG | 14935 | TGACCTTTAGCCTGACGGTGG |
| 9271 | UGACGGAGGCUGUCACUGUCU | 14936 | TGACGGAGGCTGTCACTGTCT |
| 9272 | UGACGGUGGAUGUCUCCUGGG | 14937 | TGACGGTGGATGTCTCCTGGG |
| 9273 | UGACGGUGUCAUAGGAAGAGA | 14938 | TGACGGTGTCATAGGAAGAGA |
| 9274 | UGACUCAGGCUCUGCCUCUGG | 14939 | TGACTCAGGCTCTGCCTCTGG |
| 9275 | UGACUCCUGAGUUUAGGGGUU | 14940 | TGACTCCTGAGTTTAGGGGTT |
| 9276 | UGAGAAAGUGCAAGGAGACCA | 14941 | TGAGAAAGTGCAAGGAGACCA |
| 9277 | UGAGACAUUGUCACUAUCUCC | 14942 | TGAGACATTGTCACTATCTCC |
| 9278 | UGAGACGGAGUCUCGCUCUGU | 14943 | TGAGACGGAGTCTCGCTCTGT |
| 9279 | UGAGAUGGAGUGAAGUUUGGA | 14944 | TGAGATGGAGTGAAGTTTGGA |
| 9280 | UGAGCACCGGGCAGGAGGCCU | 14945 | TGAGCACCGGGCAGGAGGCCT |
| 9281 | UGAGCCACUGCGCCCGGCCUC | 14946 | TGAGCCACTGCGCCCGGCCTC |
| 9282 | UGAGCCCAGGGGUGGCCCCAG | 14947 | TGAGCCCAGGGGTGGCCCCAG |
| 9283 | UGAGCCGUCCAAGCAGUCCCG | 14948 | TGAGCCGTCCAAGCAGTCCCG |
| 9284 | UGAGCCGUUGUCGCAGUCCAC | 14949 | TGAGCCGTTGTCGCAGTCCAC |
| 9285 | UGAGCUCAAACCAUCCUCCCA | 14950 | TGAGCTCAAACCATCCTCCCA |
| 9286 | UGAGGAAUGCAGCGGUUGACA | 14951 | TGAGGAATGCAGCGGTTGACA |
| 9287 | UGAGGAGAUCUAGGGUGAUGC | 14952 | TGAGGAGATCTAGGGTGATGC |
| 9288 | UGAGGAUUGUGUCACGGUGGA | 14953 | TGAGGATTGTGTCACGGTGGA |
| 9289 | UGAGGCAACGUUUCAACCUCG | 14954 | TGAGGCAACGTTTCAACCTCG |
| 9290 | UGAGGCACCUGUGUCUGGCCA | 14955 | TGAGGCACCTGTGTCTGGCCA |
| 9291 | UGAGGCAGCUCCUCAUGUCCC | 14956 | TGAGGCAGCTCCTCATGTCCC |
| 9292 | UGAGGCAGGGCCAGGGGGUCC | 14957 | TGAGGCAGGGCCAGGGGGTCC |
| 9293 | UGAGGCGGUUGGCACUGAAAA | 14958 | TGAGGCGGTTGGCACTGAAAA |
| 9294 | UGAGGCUGGUGUACUCGCUCC | 14959 | TGAGGCTGGTGTACTCGCTCC |
| 9295 | UGAGGGUGGCCGGGGGCCCCU | 14960 | TGAGGGTGGCCGGGGGCCCCT |
| 9296 | UGAGGUUGUGGAAGAGAACCA | 14961 | TGAGGTTGTGGAAGAGAACCA |
| 9297 | UGAGUCACAGACGAACUGCCG | 14962 | TGAGTCACAGACGAACTGCCG |
| 9298 | UGAGUUUAGGGGUUUGGCUUA | 14963 | TGAGTTTAGGGGTTTGGCTTA |
| 9299 | UGAGUUUGGUCUCGGUGCCAC | 14964 | TGAGTTTGGTCTCGGTGCCAC |
| 9300 | UGAUAACAGUUUCAACCAAUA | 14965 | TGATAACAGTTTCAACCAATA |
| 9301 | UGAUAGACGGGGUUGUCAAAG | 14966 | TGATAGACGGGGTTGTCAAAG |
| 9302 | UGAUAUCUGUCCAAAAUACUU | 14967 | TGATATCTGTCCAAAATACTT |
| 9303 | UGAUCACAGUAAGACAUUCAG | 14968 | TGATCACAGTAAGACATTCAG |
| 9304 | UGAUCCACCCGCCUCGGCCUC | 14969 | TGATCCACCCGCCTCGGCCTC |
| 9305 | UGAUCCAGCUCAGCCUCCCAA | 14970 | TGATCCAGCTCAGCCTCCCAA |
| 9306 | UGAUCGGGGCUGGUGGGGCGA | 14971 | TGATCGGGGCTGGTGGGGCGA |
| 9307 | UGAUCUGCGGGGCAGGGAGGC | 14972 | TGATCTGCGGGGCAGGGAGGC |
| 9308 | UGAUCUUGGCGGGAGUUCCCC | 14973 | TGATCTTGGCGGGAGTTCCCC |
| 9309 | UGAUGACGGUGUCAUAGGAAG | 14974 | TGATGACGGTGTCATAGGAAG |
| 9310 | UGAUGAUAUCUGUCCAAAAUA | 14975 | TGATGATATCTGTCCAAAATA |
| 9311 | UGAUGCACCAUGCAUGGUUUU | 14976 | TGATGCACCATGCATGGTTTT |
| 9312 | UGAUGCAUUCGCCGCUGUGAC | 14977 | TGATGCATTCGCCGCTGTGAC |
| 9313 | UGAUGCCAUUGGGCCACUGAA | 14978 | TGATGCCATTGGGCCACTGAA |
| 9314 | UGAUGCUGUUGAUGUUCUUAA | 14979 | TGATGCTGTTGATGTTCTTAA |
| 9315 | UGAUGGGUUCAUCUGACCAGU | 14980 | TGATGGGTTCATCTGACCAGT |
| 9316 | UGAUGUUCUUAAGCCGCCAGU | 14981 | TGATGTTCTTAAGCCGCCAGT |
| 9317 | UGAUUCGGGGGUGACAGGGCA | 14982 | TGATTCGGGGGTGACAGGGCA |
| 9318 | UGAUUUUUAACUUUUUGGUUU | 14983 | TGATTTTTAACTTTTTGGTTT |
| 9319 | UGCAAAAAUAAAUAGAUUUUA | 14984 | TGCAAAAATAAATAGATTTTA |
| 9320 | UGCAAAAUAAUAACACAAAUG | 14985 | TGCAAAATAATAACACAAATG |
| 9321 | UGCAAACAUAACAAAAAAUCC | 14986 | TGCAAACATAACAAAAAATCC |
| 9322 | UGCAAAUAAUCUUUGUACAUA | 14987 | TGCAAATAATCTTTGTACATA |
| 9323 | UGCAACAGUAACACGGCGAUU | 14988 | TGCAACAGTAACACGGCGATT |
| 9324 | UGCAACCUCCACCUCCUGGGC | 14989 | TGCAACCTCCACCTCCTGGGC |
| 9325 | UGCAAGCUCCGCUUCCCGGGU | 14990 | TGCAAGCTCCGCTTCCCGGGT |
| 9326 | UGCAAGGAGACCACGGGAAUG | 14991 | TGCAAGGAGACCACGGGAATG |
| 9327 | UGCACACAGUCCAGUUCGUGC | 14992 | TGCACACAGTCCAGTTCGTGC |
| 9328 | UGCACCAUGCAUGGUUUUUUU | 14993 | TGCACCATGCATGGTTTTTTT |
| 9329 | UGCACUCGCCACUUAGGCAGU | 14994 | TGCACTCGCCACTTAGGCAGT |
| 9330 | UGCACUGGAAGCUGGCGGGAC | 14995 | TGCACTGGAAGCTGGCGGGAC |
| 9331 | UGCACUGGGGGGGACACAGUG | 14996 | TGCACTGGGGGGGACACAGTG |
| 9332 | UGCACUUCCCAUCGUGGCAGC | 14997 | TGCACTTCCCATCGTGGCAGC |
| 9333 | UGCAGACCAAGGAGGGGCGGG | 14998 | TGCAGACCAAGGAGGGGCGGG |
| 9334 | UGCAGACGUGGGAACAGCCGC | 14999 | TGCAGACGTGGGAACAGCCGC |
| 9335 | UGCAGACUUUGUCCAGGGUGA | 15000 | TGCAGACTTTGTCCAGGGTGA |
| 9336 | UGCAGAUCAUUCUCUGGGACA | 15001 | TGCAGATCATTCTCTGGGACA |
| 9337 | UGCAGCCUCAGCCUCUCUUGG | 15002 | TGCAGCCTCAGCCTCTCTTGG |
| 9338 | UGCAGCCUCAGCCUCUGUGAG | 15003 | TGCAGCCTCAGCCTCTGTGAG |
| 9339 | UGCAGCGGUUGACACGGCCCC | 15004 | TGCAGCGGTTGACACGGCCCC |
| 9340 | UGCAGGCCACGUGUCCUCACG | 15005 | TGCAGGCCACGTGTCCTCACG |
| 9341 | UGCAGGCCUUCGUGUGGGGGU | 15006 | TGCAGGCCTTCGTGTGGGGGT |
| 9342 | UGCAGGUGACAGACAAGCACG | 15007 | TGCAGGTGACAGACAAGCACG |
| 9343 | UGCAGGUGGAGCUGUUGCACU | 15008 | TGCAGGTGGAGCTGTTGCACT |
| 9344 | UGCAGGUGUCGGGAUCCUGAC | 15009 | TGCAGGTGTCGGGATCCTGAC |
| 9345 | UGCAGUCAUAUUCCCGGUCAC | 15010 | TGCAGTCATATTCCCGGTCAC |
| 9346 | UGCAGUCCCCGCCGCGGCGAG | 15011 | TGCAGTCCCCGCCGCGGCGAG |
| 9347 | UGCAGUCGGGGCCACCAUCAC | 15012 | TGCAGTCGGGGCCACCATCAC |
| 9348 | UGCAGUGGCGCAAUCUCGGCU | 15013 | TGCAGTGGCGCAATCTCGGCT |
| 9349 | UGCAGUGGCUCGAUCAUGGCU | 15014 | TGCAGTGGCTCGATCATGGCT |
| 9350 | UGCAGUUUCCAUCAGAGCACU | 15015 | TGCAGTTTCCATCAGAGCACT |
| 9351 | UGCAUAGAAGAGGUAAACACG | 15016 | TGCATAGAAGAGGTAAACACG |
| 9352 | UGCAUAGAAGUGGAAGCACUA | 15017 | TGCATAGAAGTGGAAGCACTA |
| 9353 | UGCAUGGGCACUGUCCGAAGC | 15018 | TGCATGGGCACTGTCCGAAGC |
| 9354 | UGCAUGGUUUUUUUUUGUUUU | 15019 | TGCATGGTTTTTTTTTGTTTT |
| 9355 | UGCAUGUUUUAAACACAUACC | 15020 | TGCATGTTTTAAACACATACC |
| 9356 | UGCAUUCGCCGCUGUGACACU | 15021 | TGCATTCGCCGCTGTGACACT |
| 9357 | UGCAUUUCCCGUCUUGGCACU | 15022 | TGCATTTCCCGTCTTGGCACT |
| 9358 | UGCCAAAUGUACACAGUGUAC | 15023 | TGCCAAATGTACACAGTGTAC |
| 9359 | UGCCAAUCCCUUGUGACAUCU | 15024 | TGCCAATCCCTTGTGACATCT |
| 9360 | UGCCACCACGGAUUCAGCCAG | 15025 | TGCCACCACGGATTCAGCCAG |
| 9361 | UGCCACCGUACCCAGCUGAUU | 15026 | TGCCACCGTACCCAGCTGATT |
| 9362 | UGCCAGCAACGUCGCCCAGAG | 15027 | TGCCAGCAACGTCGCCCAGAG |
| 9363 | UGCCAGGCAGUGUCCCGACCC | 15028 | TGCCAGGCAGTGTCCCGACCC |
| 9364 | UGCCAUCGCAGACCCACUUGU | 15029 | TGCCATCGCAGACCCACTTGT |
| 9365 | UGCCAUCUGCUGUUGUGUGUU | 15030 | TGCCATCTGCTGTTGTGTGTT |
| 9366 | UGCCAUGGAUGCAGUUUCCAU | 15031 | TGCCATGGATGCAGTTTCCAT |
| 9367 | UGCCAUUGGGCCACUGAAUGU | 15032 | TGCCATTGGGCCACTGAATGT |
| 9368 | UGCCCAGGACAGAGUCGGUCC | 15033 | TGCCCAGGACAGAGTCGGTCC |
| 9369 | UGCCCAGGCUGGAAAGCAGUG | 15034 | TGCCCAGGCTGGAAAGCAGTG |
| 9370 | UGCCCAGGCUGGAGUGCAGUG | 15035 | TGCCCAGGCTGGAGTGCAGTG |
| 9371 | UGCCCCCGAGACCAGAGACCC | 15036 | TGCCCCCGAGACCAGAGACCC |
| 9372 | UGCCCCCGUUGACAUCGAUGC | 15037 | TGCCCCCGTTGACATCGATGC |
| 9373 | UGCCCCUCUCUGUCCCCGGCA | 15038 | TGCCCCTCTCTGTCCCCGGCA |
| 9374 | UGCCCGCCACCACGCCCGGCU | 15039 | TGCCCGCCACCACGCCCGGCT |
| 9375 | UGCCGAGAGAUGCACUUCCCA | 15040 | TGCCGAGAGATGCACTTCCCA |
| 9376 | UGCCGGCUGCCAUGGAUGCAG | 15041 | TGCCGGCTGCCATGGATGCAG |
| 9377 | UGCCGGUUGGUGAAGAAGAGG | 15042 | TGCCGGTTGGTGAAGAAGAGG |
| 9378 | UGCCGUCCGGGCAGGCGCAGG | 15043 | TGCCGTCCGGGCAGGCGCAGG |
| 9379 | UGCCUCAGCCUCCCAAGUAGC | 15044 | TGCCTCAGCCTCCCAAGTAGC |
| 9380 | UGCCUCAGCCUCCCGAGUAGC | 15045 | TGCCTCAGCCTCCCGAGTAGC |
| 9381 | UGCCUCCCAGAUGAAUAAAUA | 15046 | TGCCTCCCAGATGAATAAATA |
| 9382 | UGCCUCUGGGAAGUGGCAUCA | 15047 | TGCCTCTGGGAAGTGGCATCA |
| 9383 | UGCCUGAGCUCAAACCAUCCU | 15048 | TGCCTGAGCTCAAACCATCCT |
| 9384 | UGCCUGGCCAGAGGCCAUGGG | 15049 | TGCCTGGCCAGAGGCCATGGG |
| 9385 | UGCGCCCGGCCUCACCGUGCA | 15050 | TGCGCCCGGCCTCACCGTGCA |
| 9386 | UGCGGACUGCAGUGGCGCAAU | 15051 | TGCGGACTGCAGTGGCGCAAT |
| 9387 | UGCGGCCACUCAUCCGAGCCA | 15052 | TGCGGCCACTCATCCGAGCCA |
| 9388 | UGCGGGGCAGGGAGGCACAGA | 15053 | TGCGGGGCAGGGAGGCACAGA |
| 9389 | UGCUCAGGCCUGGUCUCCAAC | 15054 | TGCTCAGGCCTGGTCTCCAAC |
| 9390 | UGCUCAGGGUGGUCCUCUCAC | 15055 | TGCTCAGGGTGGTCCTCTCAC |
| 9391 | UGCUCCGAAACCAGAAAGGCU | 15056 | TGCTCCGAAACCAGAAAGGCT |
| 9392 | UGCUCGCAGCCUCUGCCAGGC | 15057 | TGCTCGCAGCCTCTGCCAGGC |
| 9393 | UGCUCGUCUGAGCCGUUGUCG | 15058 | TGCTCGTCTGAGCCGTTGTCG |
| 9394 | UGCUGAUGACGGUGUCAUAGG | 15059 | TGCTGATGACGGTGTCATAGG |
| 9395 | UGCUGAUGCACCAUGCAUGGU | 15060 | TGCTGATGCACCATGCATGGT |
| 9396 | UGCUGCAGAUCAUUCUCUGGG | 15061 | TGCTGCAGATCATTCTCTGGG |
| 9397 | UGCUGGCCACCUCCGUGUCCA | 15062 | TGCTGGCCACCTCCGTGTCCA |
| 9398 | UGCUGGGAUUACAGGCGUGAG | 15063 | TGCTGGGATTACAGGCGTGAG |
| 9399 | UGCUGUGGAUCCAGUCCACAG | 15064 | TGCTGTGGATCCAGTCCACAG |
| 9400 | UGCUGUGUCCUAGCUGGAAAC | 15065 | TGCTGTGTCCTAGCTGGAAAC |
| 9401 | UGCUGUGUCCUUACGGCUGUG | 15066 | TGCTGTGTCCTTACGGCTGTG |
| 9402 | UGCUGUUGAUGUUCUUAAGCC | 15067 | TGCTGTTGATGTTCTTAAGCC |
| 9403 | UGCUGUUGUGUGUUGAAAGCC | 15068 | TGCTGTTGTGTGTTGAAAGCC |
| 9404 | UGCUUCUCUGGGCCUGACAUC | 15069 | TGCTTCTCTGGGCCTGACATC |
| 9405 | UGCUUGAGAUGGAGUGAAGUU | 15070 | TGCTTGAGATGGAGTGAAGTT |
| 9406 | UGCUUUGGUCUUCUCUGUCUU | 15071 | TGCTTTGGTCTTCTCTGTCTT |
| 9407 | UGGAAACCCUGGCUUCCCGCG | 15072 | TGGAAACCCTGGCTTCCCGCG |
| 9408 | UGGAAAGCAGUGGCAUAAUCA | 15073 | TGGAAAGCAGTGGCATAATCA |
| 9409 | UGGAACACGUAAAGACCCCUA | 15074 | TGGAACACGTAAAGACCCCTA |
| 9410 | UGGAACUCGAAGGCCGAGCAG | 15075 | TGGAACTCGAAGGCCGAGCAG |
| 9411 | UGGAACUCGUUUCUUUCGCAU | 15076 | TGGAACTCGTTTCTTTCGCAT |
| 9412 | UGGAAGAGAACCAUAUCCUCU | 15077 | TGGAAGAGAACCATATCCTCT |
| 9413 | UGGAAGCACUAGGUGGGCGGA | 15078 | TGGAAGCACTAGGTGGGCGGA |
| 9414 | UGGAAGCCGUCGGGGCACAGG | 15079 | TGGAAGCCGTCGGGGCACAGG |
| 9415 | UGGAAGCCUUCCUCACACUGG | 15080 | TGGAAGCCTTCCTCACACTGG |
| 9416 | UGGAAGCUGGCGGGACCACAG | 15081 | TGGAAGCTGGCGGGACCACAG |
| 9417 | UGGAAGUGGGUAGGGGUCGGG | 15082 | TGGAAGTGGGTAGGGGTCGGG |
| 9418 | UGGAAUUCGUCAGGGCGACAG | 15083 | TGGAATTCGTCAGGGCGACAG |
| 9419 | UGGACAGAGCCCUCACGCUAC | 15084 | TGGACAGAGCCCTCACGCTAC |
| 9420 | UGGACCUCAUCCUCUGUGGUC | 15085 | TGGACCTCATCCTCTGTGGTC |
| 9421 | UGGAGAGAAACUCAAAACUUC | 15086 | TGGAGAGAAACTCAAAACTTC |
| 9422 | UGGAGAGAAAUGGAGGUGUCA | 15087 | TGGAGAGAAATGGAGGTGTCA |
| 9423 | UGGAGCCCACAGCCUUGCAGG | 15088 | TGGAGCCCACAGCCTTGCAGG |
| 9424 | UGGAGCCGUUCUCCCUGAAUA | 15089 | TGGAGCCGTTCTCCCTGAATA |
| 9425 | UGGAGCUGACCUUUAGCCUGA | 15090 | TGGAGCTGACCTTTAGCCTGA |
| 9426 | UGGAGCUGUUGCACUGGAAGC | 15091 | TGGAGCTGTTGCACTGGAAGC |
| 9427 | UGGAGGAUUUAUUUAUUUUUU | 15092 | TGGAGGATTTATTTATTTTTT |
| 9428 | UGGAGGCAUUUGCAUAGAAGU | 15093 | TGGAGGCATTTGCATAGAAGT |
| 9429 | UGGAGGUGUCAUCCUGGUCCC | 15094 | TGGAGGTGTCATCCTGGTCCC |
| 9430 | UGGAGUCAACCCAGUAGAGGC | 15095 | TGGAGTCAACCCAGTAGAGGC |
| 9431 | UGGAGUGAAGUUUGGAGUCAA | 15096 | TGGAGTGAAGTTTGGAGTCAA |
| 9432 | UGGAGUGCAGUGGCUCGAUCA | 15097 | TGGAGTGCAGTGGCTCGATCA |
| 9433 | UGGAGUGGAUGCACUCGCCAC | 15098 | TGGAGTGGATGCACTCGCCAC |
| 9434 | UGGAUCCAGUCCACAGCCAGC | 15099 | TGGATCCAGTCCACAGCCAGC |
| 9435 | UGGAUGAGGCAGGGCCAGGGG | 15100 | TGGATGAGGCAGGGCCAGGGG |
| 9436 | UGGAUGCACUCGCCACUUAGG | 15101 | TGGATGCACTCGCCACTTAGG |
| 9437 | UGGAUGCAGUUUCCAUCAGAG | 15102 | TGGATGCAGTTTCCATCAGAG |
| 9438 | UGGAUGUCUCCUGGGUGGCCA | 15103 | TGGATGTCTCCTGGGTGGCCA |
| 9439 | UGGAUGUCUCUGCUGAUGACG | 15104 | TGGATGTCTCTGCTGATGACG |
| 9440 | UGGCAAAUGUGGACCUCAUCC | 15105 | TGGCAAATGTGGACCTCATCC |
| 9441 | UGGCACUCAGCGCUGCCAUCG | 15106 | TGGCACTCAGCGCTGCCATCG |
| 9442 | UGGCACUGAAAAUGGCUUCGU | 15107 | TGGCACTGAAAATGGCTTCGT |
| 9443 | UGGCACUGGAACUCGUUUCUU | 15108 | TGGCACTGGAACTCGTTTCTT |
| 9444 | UGGCACUUGUAGCCACCCUCC | 15109 | TGGCACTTGTAGCCACCCTCC |
| 9445 | UGGCAGCCGCCAUUGCUCAGG | 15110 | TGGCAGCCGCCATTGCTCAGG |
| 9446 | UGGCAGCGAAACUCGUCCUGG | 15111 | TGGCAGCGAAACTCGTCCTGG |
| 9447 | UGGCAGGCAAUGCUUUGGUCU | 15112 | TGGCAGGCAATGCTTTGGTCT |
| 9448 | UGGCAGUUCUCGAUAUUCACG | 15113 | TGGCAGTTCTCGATATTCACG |
| 9449 | UGGCAUAAUCAUAGCUCACGA | 15114 | TGGCATAATCATAGCTCACGA |
| 9450 | UGGCAUCAUUUGGUGAAUGAG | 15115 | TGGCATCATTTGGTGAATGAG |
| 9451 | UGGCCAAAUUCAUUUUUUAAG | 15116 | TGGCCAAATTCATTTTTTAAG |
| 9452 | UGGCCACAGCGCAGUUUUCCU | 15117 | TGGCCACAGCGCAGTTTTCCT |
| 9453 | UGGCCACAGGACAGCCUUGCU | 15118 | TGGCCACAGGACAGCCTTGCT |
| 9454 | UGGCCACCUCCGUGUCCAGAG | 15119 | TGGCCACCTCCGTGTCCAGAG |
| 9455 | UGGCCACUGCAGCCUCAGCCU | 15120 | TGGCCACTGCAGCCTCAGCCT |
| 9456 | UGGCCAGAGGCCAUGGGCUGC | 15121 | TGGCCAGAGGCCATGGGCTGC |
| 9457 | UGGCCAGCAGCAUGCCGUCCG | 15122 | TGGCCAGCAGCATGCCGTCCG |
| 9458 | UGGCCAUCGCACCUCCAGAAC | 15123 | TGGCCATCGCACCTCCAGAAC |
| 9459 | UGGCCCCAGGCAGCCGGGAGG | 15124 | TGGCCCCAGGCAGCCGGGAGG |
| 9460 | UGGCCCUUGGCUUGGAGCCGU | 15125 | TGGCCCTTGGCTTGGAGCCGT |
| 9461 | UGGCCGGGGGCCCCUCUGUGA | 15126 | TGGCCGGGGGCCCCTCTGTGA |
| 9462 | UGGCCUGGGAUCCCAUCCCAA | 15127 | TGGCCTGGGATCCCATCCCAA |
| 9463 | UGGCGAUGGGGAGGACAAUGG | 15128 | TGGCGATGGGGAGGACAATGG |
| 9464 | UGGCGCAAUCUCGGCUCACUG | 15129 | TGGCGCAATCTCGGCTCACTG |
| 9465 | UGGCGGGACCACAGGUGAGCA | 15130 | TGGCGGGACCACAGGTGAGCA |
| 9466 | UGGCGGGAGUUCCCCAGUCAG | 15131 | TGGCGGGAGTTCCCCAGTCAG |
| 9467 | UGGCUCACUGCAACCUCCACC | 15132 | TGGCTCACTGCAACCTCCACC |
| 9468 | UGGCUCGAUCAUGGCUCACUG | 15133 | TGGCTCGATCATGGCTCACTG |
| 9469 | UGGCUGAAGAUCUCGGCUGCA | 15134 | TGGCTGAAGATCTCGGCTGCA |
| 9470 | UGGCUGCAGGUGUCGGGAUCC | 15135 | TGGCTGCAGGTGTCGGGATCC |
| 9471 | UGGCUGGGUGAGGUUGUGGAA | 15136 | TGGCTGGGTGAGGTTGTGGAA |
| 9472 | UGGCUGUCUAGCAAGGCUUGC | 15137 | TGGCTGTCTAGCAAGGCTTGC |
| 9473 | UGGCUUAAGGAAGGUACAAAC | 15138 | TGGCTTAAGGAAGGTACAAAC |
| 9474 | UGGCUUAGAGAUUGGUGGAUG | 15139 | TGGCTTAGAGATTGGTGGATG |
| 9475 | UGGCUUCGUUGAUGAUAUCUG | 15140 | TGGCTTCGTTGATGATATCTG |
| 9476 | UGGCUUGGAGCCGUUCUCCCU | 15141 | TGGCTTGGAGCCGTTCTCCCT |
| 9477 | UGGCUUGGAGGCAUUUGCAUA | 15142 | TGGCTTGGAGGCATTTGCATA |
| 9478 | UGGGAACAGCCGCCGUUGUUG | 15143 | TGGGAACAGCCGCCGTTGTTG |
| 9479 | UGGGAAGUGGCAUCAUUUGGU | 15144 | TGGGAAGTGGCATCATTTGGT |
| 9480 | UGGGACAGGUCAGACCAGUAG | 15145 | TGGGACAGGTCAGACCAGTAG |
| 9481 | UGGGACUACAGGUGCCCGCCA | 15146 | TGGGACTACAGGTGCCCGCCA |
| 9482 | UGGGACUCAUCAGAGCCAUCC | 15147 | TGGGACTCATCAGAGCCATCC |
| 9483 | UGGGAGCACGUCUUGGGGGAG | 15148 | TGGGAGCACGTCTTGGGGGAG |
| 9484 | UGGGAGCACGUCUUGGGGGGA | 15149 | TGGGAGCACGTCTTGGGGGGA |
| 9485 | UGGGAUCACAGGCACGUGCCA | 15150 | TGGGATCACAGGCACGTGCCA |
| 9486 | UGGGAUCCCAUCCCAACACAC | 15151 | TGGGATCCCATCCCAACACAC |
| 9487 | UGGGAUCUCGCUUUGUUGCUC | 15152 | TGGGATCTCGCTTTGTTGCTC |
| 9488 | UGGGAUUACAGGCGUGAGCCA | 15153 | TGGGATTACAGGCGTGAGCCA |
| 9489 | UGGGAUUACAGGCGUGAGGCA | 15154 | TGGGATTACAGGCGTGAGGCA |
| 9490 | UGGGCACCAGGCUGGUGUCCU | 15155 | TGGGCACCAGGCTGGTGTCCT |
| 9491 | UGGGCACUGUCCGAAGCCUGU | 15156 | TGGGCACTGTCCGAAGCCTGT |
| 9492 | UGGGCAGGGACGGGACUCCAG | 15157 | TGGGCAGGGACGGGACTCCAG |
| 9493 | UGGGCCACCAGCUGGAAGCCG | 15158 | TGGGCCACCAGCTGGAAGCCG |
| 9494 | UGGGCCACUGAAUGUUUUCAG | 15159 | TGGGCCACTGAATGTTTTCAG |
| 9495 | UGGGCCAGCCUCUUUUCAUCC | 15160 | TGGGCCAGCCTCTTTTCATCC |
| 9496 | UGGGCCUGACAUCCCCUCCCC | 15161 | TGGGCCTGACATCCCCTCCCC |
| 9497 | UGGGCGAGUGGGGGUUGAUCU | 15162 | TGGGCGAGTGGGGGTTGATCT |
| 9498 | UGGGCGGACAUAAAGACGACA | 15163 | TGGGCGGACATAAAGACGACA |
| 9499 | UGGGCUCAGGCGAUCCUCCUG | 15164 | TGGGCTCAGGCGATCCTCCTG |
| 9500 | UGGGCUCUGUCAAGCUGGGUG | 15165 | TGGGCTCTGTCAAGCTGGGTG |
| 9501 | UGGGCUGCUGAUGCACCAUGC | 15166 | TGGGCTGCTGATGCACCATGC |
| 9502 | UGGGCUUCUUCUCAUUUCCUC | 15167 | TGGGCTTCTTCTCATTTCCTC |
| 9503 | UGGGGAAGUGAAUGGCUUGGA | 15168 | TGGGGAAGTGAATGGCTTGGA |
| 9504 | UGGGGACAAUUGCCAAUCCCU | 15169 | TGGGGACAATTGCCAATCCCT |
| 9505 | UGGGGACAGUAGGUUUUCAGC | 15170 | TGGGGACAGTAGGTTTTCAGC |
| 9506 | UGGGGACGGAGGUGUCGCCAC | 15171 | TGGGGACGGAGGTGTCGCCAC |
| 9507 | UGGGGAGGACAAUGGACAGAG | 15172 | TGGGGAGGACAATGGACAGAG |
| 9508 | UGGGGAUGAGGCUGGUGUACU | 15173 | TGGGGATGAGGCTGGTGTACT |
| 9509 | UGGGGCGAGGGCGCCCCCCAG | 15174 | TGGGGCGAGGGCGCCCCCCAG |
| 9510 | UGGGGGAGCACGUCUCCUGGG | 15175 | TGGGGGAGCACGTCTCCTGGG |
| 9511 | UGGGGGAUGCAGGUGGAGCUG | 15176 | TGGGGGATGCAGGTGGAGCTG |
| 9512 | UGGGGGGACAGCCUUGCUCGU | 15177 | TGGGGGGACAGCCTTGCTCGT |
| 9513 | UGGGGGGGACACAGUGUUUUG | 15178 | TGGGGGGGACACAGTGTTTTG |
| 9514 | UGGGGGUCCAGCUGGAAGCCU | 15179 | TGGGGGTCCAGCTGGAAGCCT |
| 9515 | UGGGGGUUGAUCUGCGGGGCA | 15180 | TGGGGGTTGATCTGCGGGGCA |
| 9516 | UGGGGUCUUACUAUGUUGCCC | 15181 | TGGGGTCTTACTATGTTGCCC |
| 9517 | UGGGUAGGGGUCGGGAGGAUG | 15182 | TGGGTAGGGGTCGGGAGGATG |
| 9518 | UGGGUCAUGAUUCGGGGGUGA | 15183 | TGGGTCATGATTCGGGGGTGA |
| 9519 | UGGGUCCCUCGCAGAGUGUCA | 15184 | TGGGTCCCTCGCAGAGTGTCA |
| 9520 | UGGGUGAGGUUGUGGAAGAGA | 15185 | TGGGTGAGGTTGTGGAAGAGA |
| 9521 | UGGGUGCAGGCCACGUGUCCU | 15186 | TGGGTGCAGGCCACGTGTCCT |
| 9522 | UGGGUGCUGCAGAUCAUUCUC | 15187 | TGGGTGCTGCAGATCATTCTC |
| 9523 | UGGGUGGCCACUGCAGCCUCA | 15188 | TGGGTGGCCACTGCAGCCTCA |
| 9524 | UGGGUGGGUCAUGAUUCGGGG | 15189 | TGGGTGGGTCATGATTCGGGG |
| 9525 | UGGGUUCAUCUGACCAGUCCC | 15190 | TGGGTTCATCTGACCAGTCCC |
| 9526 | UGGUAUCCGCAACAGAGACAG | 15191 | TGGTATCCGCAACAGAGACAG |
| 9527 | UGGUCCCCCCGGGCCUGUUUC | 15192 | TGGTCCCCCCGGGCCTGTTTC |
| 9528 | UGGUCCCGCACUCUUUGAUGG | 15193 | TGGTCCCGCACTCTTTGATGG |
| 9529 | UGGUCCUCUCACACCAGUUCA | 15194 | TGGTCCTCTCACACCAGTTCA |
| 9530 | UGGUCUCCAACUCCUGAACUC | 15195 | TGGTCTCCAACTCCTGAACTC |
| 9531 | UGGUCUCGAUCUCCUGACCUC | 15196 | TGGTCTCGATCTCCTGACCTC |
| 9532 | UGGUCUCGGUGCCACCACGGA | 15197 | TGGTCTCGGTGCCACCACGGA |
| 9533 | UGGUCUUCCGGUUGCCCCCGU | 15198 | TGGTCTTCCGGTTGCCCCCGT |
| 9534 | UGGUCUUCUCUGUCUUUGAAU | 15199 | TGGTCTTCTCTGTCTTTGAAT |
| 9535 | UGGUCUUCUGAUAGACGGGGU | 15200 | TGGTCTTCTGATAGACGGGGT |
| 9536 | UGGUGAAGAAGAGGUAGGCGA | 15201 | TGGTGAAGAAGAGGTAGGCGA |
| 9537 | UGGUGAAUGAGUUUGGUCUCG | 15202 | TGGTGAATGAGTTTGGTCTCG |
| 9538 | UGGUGAGACAUUGUCACUAUC | 15203 | TGGTGAGACATTGTCACTATC |
| 9539 | UGGUGAGCCCAGGGGUGGCCC | 15204 | TGGTGAGCCCAGGGGTGGCCC |
| 9540 | UGGUGCCAUCUGCUGUUGUGU | 15205 | TGGTGCCATCTGCTGTTGTGT |
| 9541 | UGGUGGAUGAGGCAGGGCCAG | 15206 | TGGTGGATGAGGCAGGGCCAG |
| 9542 | UGGUGGGGCGAGGGCGCCCCC | 15207 | TGGTGGGGCGAGGGCGCCCCC |
| 9543 | UGGUGUACUCGCUCCGGUCCA | 15208 | TGGTGTACTCGCTCCGGTCCA |
| 9544 | UGGUGUCCUGACAGCCACACC | 15209 | TGGTGTCCTGACAGCCACACC |
| 9545 | UGGUUGUGGCAAAUGUGGACC | 15210 | TGGTTGTGGCAAATGTGGACC |
| 9546 | UGGUUGUGUGCUGUGUCCUUA | 15211 | TGGTTGTGTGCTGTGTCCTTA |
| 9547 | UGGUUUAAAAAGUGACACCCA | 15212 | TGGTTTAAAAAGTGACACCCA |
| 9548 | UGGUUUUUGUAGAGAUGGGAU | 15213 | TGGTTTTTGTAGAGATGGGAT |
| 9549 | UGGUUUUUUUUUGUUUUUUUU | 15214 | TGGTTTTTTTTTGTTTTTTTT |
| 9550 | UGUACAACUCUGAACUGAGAA | 15215 | TGTACAACTCTGAACTGAGAA |
| 9551 | UGUACACAGUGUACAACUCUG | 15216 | TGTACACAGTGTACAACTCTG |
| 9552 | UGUACAGGGACGCAUUUACGU | 15217 | TGTACAGGGACGCATTTACGT |
| 9553 | UGUACAUAAAGAAGAGGCAUU | 15218 | TGTACATAAAGAAGAGGCATT |
| 9554 | UGUACUCGCUCCGGUCCAGCG | 15219 | TGTACTCGCTCCGGTCCAGCG |
| 9555 | UGUAGAGAUGGGAUCUCGCUU | 15220 | TGTAGAGATGGGATCTCGCTT |
| 9556 | UGUAGCCACCCUCCAGGUUCA | 15221 | TGTAGCCACCCTCCAGGTTCA |
| 9557 | UGUAGCCGUCCUGGUUGUGGC | 15222 | TGTAGCCGTCCTGGTTGTGGC |
| 9558 | UGUAGGAGAUGCAUUUCCCGU | 15223 | TGTAGGAGATGCATTTCCCGT |
| 9559 | UGUAGGGAGAGGCACGCUCUG | 15224 | TGTAGGGAGAGGCACGCTCTG |
| 9560 | UGUAUAUAUAUAUAUAUAAGU | 15225 | TGTATATATATATATATAAGT |
| 9561 | UGUAUGUCGCGGAGGCGGCUC | 15226 | TGTATGTCGCGGAGGCGGCTC |
| 9562 | UGUAUUUCUGAAAUAGGGUCU | 15227 | TGTATTTCTGAAATAGGGTCT |
| 9563 | UGUAUUUUUAGUAGAGACGGG | 15228 | TGTATTTTTAGTAGAGACGGG |
| 9564 | UGUCAAAGUUGAUGCUGUUGA | 15229 | TGTCAAAGTTGATGCTGTTGA |
| 9565 | UGUCAAGCUGGGUGCUGCAGA | 15230 | TGTCAAGCTGGGTGCTGCAGA |
| 9566 | UGUCACACAGCUGCCCCCGAG | 15231 | TGTCACACAGCTGCCCCCGAG |
| 9567 | UGUCACAUUAACGCAGCCAAC | 15232 | TGTCACATTAACGCAGCCAAC |
| 9568 | UGUCACGGUGGAGAGAAACUC | 15233 | TGTCACGGTGGAGAGAAACTC |
| 9569 | UGUCACUAUCUCCACCGUGGU | 15234 | TGTCACTATCTCCACCGTGGT |
| 9570 | UGUCACUGUCUCUCCGGACAU | 15235 | TGTCACTGTCTCTCCGGACAT |
| 9571 | UGUCAGACAGCCUUGCUCGUC | 15236 | TGTCAGACAGCCTTGCTCGTC |
| 9572 | UGUCAUAGGAAGAGACGCCGU | 15237 | TGTCATAGGAAGAGACGCCGT |
| 9573 | UGUCAUCCUGGUCCCCCCGGG | 15238 | TGTCATCCTGGTCCCCCCGGG |
| 9574 | UGUCCAAAAUACUUUGUCCUC | 15239 | TGTCCAAAATACTTTGTCCTC |
| 9575 | UGUCCAAGCAUUCGUUGGUCC | 15240 | TGTCCAAGCATTCGTTGGTCC |
| 9576 | UGUCCACACCAUUCAGGCCCC | 15241 | TGTCCACACCATTCAGGCCCC |
| 9577 | UGUCCAGAGCGACCACGUUCC | 15242 | TGTCCAGAGCGACCACGTTCC |
| 9578 | UGUCCAGGGUGAUGCAUUCGC | 15243 | TGTCCAGGGTGATGCATTCGC |
| 9579 | UGUCCCCGGCAUUCAUUGACA | 15244 | TGTCCCCGGCATTCATTGACA |
| 9580 | UGUCCCCUUGGAACACGUAAA | 15245 | TGTCCCCTTGGAACACGTAAA |
| 9581 | UGUCCCGACCCGGAUCACGAC | 15246 | TGTCCCGACCCGGATCACGAC |
| 9582 | UGUCCCUGGCCAGCAGCAUGC | 15247 | TGTCCCTGGCCAGCAGCATGC |
| 9583 | UGUCCCUGGGGACAAUUGCCA | 15248 | TGTCCCTGGGGACAATTGCCA |
| 9584 | UGUCCGAAGCCUGUUCUGCCU | 15249 | TGTCCGAAGCCTGTTCTGCCT |
| 9585 | UGUCCUAGCUGGAAACCCUGG | 15250 | TGTCCTAGCTGGAAACCCTGG |
| 9586 | UGUCCUCAAAGACGGCCAAGG | 15251 | TGTCCTCAAAGACGGCCAAGG |
| 9587 | UGUCCUCACGGCCAAGGUAAC | 15252 | TGTCCTCACGGCCAAGGTAAC |
| 9588 | UGUCCUGACAGCCACACCUGG | 15253 | TGTCCTGACAGCCACACCTGG |
| 9589 | UGUCCUUACGGCUGUGGAGCU | 15254 | TGTCCTTACGGCTGTGGAGCT |
| 9590 | UGUCCUUGCAGUCAUAUUCCC | 15255 | TGTCCTTGCAGTCATATTCCC |
| 9591 | UGUCCUUGCAGUCGGGGCCAC | 15256 | TGTCCTTGCAGTCGGGGCCAC |
| 9592 | UGUCGCAGGCCCACAGCUGGG | 15257 | TGTCGCAGGCCCACAGCTGGG |
| 9593 | UGUCGCAGUCCACUUGGCCAU | 15258 | TGTCGCAGTCCACTTGGCCAT |
| 9594 | UGUCGCCACAGAGCACAGCGG | 15259 | TGTCGCCACAGAGCACAGCGG |
| 9595 | UGUCGCCCACGUGGCUGAAGA | 15260 | TGTCGCCCACGTGGCTGAAGA |
| 9596 | UGUCGCCCACUGCAGUCCCCG | 15261 | TGTCGCCCACTGCAGTCCCCG |
| 9597 | UGUCGCCCAGGCCAGACUGCG | 15262 | TGTCGCCCAGGCCAGACTGCG |
| 9598 | UGUCGCGGAGGCGGCUCCGGG | 15263 | TGTCGCGGAGGCGGCTCCGGG |
| 9599 | UGUCGGGAACAGGUCGGGUGG | 15264 | TGTCGGGAACAGGTCGGGTGG |
| 9600 | UGUCGGGAUCCUGACACUCAU | 15265 | TGTCGGGATCCTGACACTCAT |
| 9601 | UGUCGUCGCCUUUGUGACAGG | 15266 | TGTCGTCGCCTTTGTGACAGG |
| 9602 | UGUCUAGCAAGGCUUGCAUAG | 15267 | TGTCTAGCAAGGCTTGCATAG |
| 9603 | UGUCUCAGGCACUUAAUAAAU | 15268 | TGTCTCAGGCACTTAATAAAT |
| 9604 | UGUCUCCUGGGUGGCCACUGC | 15269 | TGTCTCCTGGGTGGCCACTGC |
| 9605 | UGUCUCGAGGGGUAGCUGUAG | 15270 | TGTCTCGAGGGGTAGCTGTAG |
| 9606 | UGUCUCUCCGGACAUCAGUGC | 15271 | TGTCTCTCCGGACATCAGTGC |
| 9607 | UGUCUCUGCUGAUGACGGUGU | 15272 | TGTCTCTGCTGATGACGGTGT |
| 9608 | UGUCUGGCCAAAUUCAUUUUU | 15273 | TGTCTGGCCAAATTCATTTTT |
| 9609 | UGUCUUUGAAUAAAACAAGGC | 15274 | TGTCTTTGAATAAAACAAGGC |
| 9610 | UGUGAACUUGAUCGGGGCUGG | 15275 | TGTGAACTTGATCGGGGCTGG |
| 9611 | UGUGACACUUGAACUUGUUGG | 15276 | TGTGACACTTGAACTTGTTGG |
| 9612 | UGUGACAGGAACCGCGGAGGA | 15277 | TGTGACAGGAACCGCGGAGGA |
| 9613 | UGUGACAUCUUCACGCGGGAG | 15278 | TGTGACATCTTCACGCGGGAG |
| 9614 | UGUGAGGCAGCUCCUCAUGUC | 15279 | TGTGAGGCAGCTCCTCATGTC |
| 9615 | UGUGAGGCGGUUGGCACUGAA | 15280 | TGTGAGGCGGTTGGCACTGAA |
| 9616 | UGUGCUGUGUCCUUACGGCUG | 15281 | TGTGCTGTGTCCTTACGGCTG |
| 9617 | UGUGGAAGAGAACCAUAUCCU | 15282 | TGTGGAAGAGAACCATATCCT |
| 9618 | UGUGGACCUCAUCCUCUGUGG | 15283 | TGTGGACCTCATCCTCTGTGG |
| 9619 | UGUGGAGCUGACCUUUAGCCU | 15284 | TGTGGAGCTGACCTTTAGCCT |
| 9620 | UGUGGAUCCAGUCCACAGCCA | 15285 | TGTGGATCCAGTCCACAGCCA |
| 9621 | UGUGGCAAAUGUGGACCUCAU | 15286 | TGTGGCAAATGTGGACCTCAT |
| 9622 | UGUGGGGGUCCAGCUGGAAGC | 15287 | TGTGGGGGTCCAGCTGGAAGC |
| 9623 | UGUGGUCUUCUGAUAGACGGG | 15288 | TGTGGTCTTCTGATAGACGGG |
| 9624 | UGUGUAUAUAUAUAUAUAUAA | 15289 | TGTGTATATATATATATATAA |
| 9625 | UGUGUCACGGUGGAGAGAAAC | 15290 | TGTGTCACGGTGGAGAGAAAC |
| 9626 | UGUGUCCUAGCUGGAAACCCU | 15291 | TGTGTCCTAGCTGGAAACCCT |
| 9627 | UGUGUCCUUACGGCUGUGGAG | 15292 | TGTGTCCTTACGGCTGTGGAG |
| 9628 | UGUGUCUGGCCAAAUUCAUUU | 15293 | TGTGTCTGGCCAAATTCATTT |
| 9629 | UGUGUGCUGUGUCCUUACGGC | 15294 | TGTGTGCTGTGTCCTTACGGC |
| 9630 | UGUGUGUAUAUAUAUAUAUAU | 15295 | TGTGTGTATATATATATATAT |
| 9631 | UGUGUGUUGAAAGCCACUUGC | 15296 | TGTGTGTTGAAAGCCACTTGC |
| 9632 | UGUGUUGAAAGCCACUUGCUU | 15297 | TGTGTTGAAAGCCACTTGCTT |
| 9633 | UGUUAGCCAGGAUGGUCUCGA | 15298 | TGTTAGCCAGGATGGTCTCGA |
| 9634 | UGUUCACGCCACGUCAUCCUC | 15299 | TGTTCACGCCACGTCATCCTC |
| 9635 | UGUUCUGCCUCCCAGAUGAAU | 15300 | TGTTCTGCCTCCCAGATGAAT |
| 9636 | UGUUCUUAAGCCGCCAGUUCU | 15301 | TGTTCTTAAGCCGCCAGTTCT |
| 9637 | UGUUGAAAGCCACUUGCUUCU | 15302 | TGTTGAAAGCCACTTGCTTCT |
| 9638 | UGUUGAUGUUCUUAAGCCGCC | 15303 | TGTTGATGTTCTTAAGCCGCC |
| 9639 | UGUUGCACUGGAAGCUGGCGG | 15304 | TGTTGCACTGGAAGCTGGCGG |
| 9640 | UGUUGCAGACUUUGUCCAGGG | 15305 | TGTTGCAGACTTTGTCCAGGG |
| 9641 | UGUUGCCCAGGCUGGAAAGCA | 15306 | TGTTGCCCAGGCTGGAAAGCA |
| 9642 | UGUUGCCCAGGCUGGAGUGCA | 15307 | TGTTGCCCAGGCTGGAGTGCA |
| 9643 | UGUUGCUCAGGCCUGGUCUCC | 15308 | TGTTGCTCAGGCCTGGTCTCC |
| 9644 | UGUUGCUGUGGAUCCAGUCCA | 15309 | TGTTGCTGTGGATCCAGTCCA |
| 9645 | UGUUGGGUCCCUCGCAGAGUG | 15310 | TGTTGGGTCCCTCGCAGAGTG |
| 9646 | UGUUGUCCAAGCAUUCGUUGG | 15311 | TGTTGTCCAAGCATTCGTTGG |
| 9647 | UGUUGUGUGUUGAAAGCCACU | 15312 | TGTTGTGTGTTGAAAGCCACT |
| 9648 | UGUUUCUCUUAUCCUUCACGA | 15313 | TGTTTCTCTTATCCTTCACGA |
| 9649 | UGUUUGAGGAUUGUGUCACGG | 15314 | TGTTTGAGGATTGTGTCACGG |
| 9650 | UGUUUUAAACACAUACCCAUC | 15315 | TGTTTTAAACACATACCCATC |
| 9651 | UGUUUUCAGUCACCAGCGAGU | 15316 | TGTTTTCAGTCACCAGCGAGT |
| 9652 | UGUUUUGUCCCUGGGGACAAU | 15317 | TGTTTTGTCCCTGGGGACAAT |
| 9653 | UGUUUUUUUUUUUUGAGACGG | 15318 | TGTTTTTTTTTTTTGAGACGG |
| 9654 | UUAAAAAGUGACACCCAUCUC | 15319 | TTAAAAAGTGACACCCATCTC |
| 9655 | UUAAACACAUACCCAUCAACG | 15320 | TTAAACACATACCCATCAACG |
| 9656 | UUAACGCAGCCAACUUCAUCG | 15321 | TTAACGCAGCCAACTTCATCG |
| 9657 | UUAACUUUUUGGUUUUUGUAG | 15322 | TTAACTTTTTGGTTTTTGTAG |
| 9658 | UUAAGAAAUUUAAUUGAUCAC | 15323 | TTAAGAAATTTAATTGATCAC |
| 9659 | UUAAGAGAUGGGGUCUUACUA | 15324 | TTAAGAGATGGGGTCTTACTA |
| 9660 | UUAAGCCGCCAGUUCUUCCAU | 15325 | TTAAGCCGCCAGTTCTTCCAT |
| 9661 | UUAAGGAAGGUACAAACCCAC | 15326 | TTAAGGAAGGTACAAACCCAC |
| 9662 | UUAAGGGUGACCAGUGACUCA | 15327 | TTAAGGGTGACCAGTGACTCA |
| 9663 | UUAAGGUCAUUGCAGACGUGG | 15328 | TTAAGGTCATTGCAGACGTGG |
| 9664 | UUAAUAAAUAUUAAGGGUGAC | 15329 | TTAATAAATATTAAGGGTGAC |
| 9665 | UUAAUUGAUCACAGUAAGACA | 15330 | TTAATTGATCACAGTAAGACA |
| 9666 | UUACAGGCGUGAGCCACUGCG | 15331 | TTACAGGCGTGAGCCACTGCG |
| 9667 | UUACAGGCGUGAGGCACCUGU | 15332 | TTACAGGCGTGAGGCACCTGT |
| 9668 | UUACGGCUGUGGAGCUGACCU | 15333 | TTACGGCTGTGGAGCTGACCT |
| 9669 | UUACGUGCUCCGAAACCAGAA | 15334 | TTACGTGCTCCGAAACCAGAA |
| 9670 | UUACUAUGUUGCCCAGGCUGG | 15335 | TTACTATGTTGCCCAGGCTGG |
| 9671 | UUAGAGAUUGGUGGAUGAGGC | 15336 | TTAGAGATTGGTGGATGAGGC |
| 9672 | UUAGCCAGGAUGGUCUCGAUC | 15337 | TTAGCCAGGATGGTCTCGATC |
| 9673 | UUAGCCUGACGGUGGAUGUCU | 15338 | TTAGCCTGACGGTGGATGTCT |
| 9674 | UUAGGCAGUGGAACUCGAAGG | 15339 | TTAGGCAGTGGAACTCGAAGG |
| 9675 | UUAGGGGUUUGGCUUAGAGAU | 15340 | TTAGGGGTTTGGCTTAGAGAT |
| 9676 | UUAGUAGAGACGGGGUUUCAC | 15341 | TTAGTAGAGACGGGGTTTCAC |
| 9677 | UUAUAGUUGUAUUUCUGAAAU | 15342 | TTATAGTTGTATTTCTGAAAT |
| 9678 | UUAUAUAUAUGUGUGUAUAUA | 15343 | TTATATATATGTGTGTATATA |
| 9679 | UUAUCACGGUUCCCUGCACUG | 15344 | TTATCACGGTTCCCTGCACTG |
| 9680 | UUAUCCUUCACGAGGAAAGGA | 15345 | TTATCCTTCACGAGGAAAGGA |
| 9681 | UUAUUUAUUUUUUUAUAGUUG | 15346 | TTATTTATTTTTTTATAGTTG |
| 9682 | UUAUUUUUUUAUAGUUGUAUU | 15347 | TTATTTTTTTATAGTTGTATT |
| 9683 | UUCAACCAAUAUACAAAGUGC | 15348 | TTCAACCAATATACAAAGTGC |
| 9684 | UUCAACCUCGUAAGGAACCGA | 15349 | TTCAACCTCGTAAGGAACCGA |
| 9685 | UUCACACCAUUCUCCUGCCUC | 15350 | TTCACACCATTCTCCTGCCTC |
| 9686 | UUCACGAGGAAAGGAAGAAAC | 15351 | TTCACGAGGAAAGGAAGAAAC |
| 9687 | UUCACGAUCACGGCUUUGAAG | 15352 | TTCACGATCACGGCTTTGAAG |
| 9688 | UUCACGCAGAGCUGGCUGCAG | 15353 | TTCACGCAGAGCTGGCTGCAG |
| 9689 | UUCACGCCACGUCAUCCUCCA | 15354 | TTCACGCCACGTCATCCTCCA |
| 9690 | UUCACGCCCUUGGUAUCCGCA | 15355 | TTCACGCCCTTGGTATCCGCA |
| 9691 | UUCACGCGGGAGUCUGACGGA | 15356 | TTCACGCGGGAGTCTGACGGA |
| 9692 | UUCACGUGUUAGCCAGGAUGG | 15357 | TTCACGTGTTAGCCAGGATGG |
| 9693 | UUCACUCCUCUUGGCUGGGUG | 15358 | TTCACTCCTCTTGGCTGGGTG |
| 9694 | UUCAGAAAGAACCUGAAGUCC | 15359 | TTCAGAAAGAACCTGAAGTCC |
| 9695 | UUCAGAGGCAAUAACCCCCUA | 15360 | TTCAGAGGCAATAACCCCCTA |
| 9696 | UUCAGCCAACAAGUUGACAUC | 15361 | TTCAGCCAACAAGTIGACATC |
| 9697 | UUCAGCCAGAUCAUUUCCGAC | 15362 | TTCAGCCAGATCATTTCCGAC |
| 9698 | UUCAGGCCCCCUUUCUUGAUC | 15363 | TTCAGGCCCCCTTTCTTGATC |
| 9699 | UUCAGGCUACAAAAACCUUCU | 15364 | TTCAGGCTACAAAAACCTTCT |
| 9700 | UUCAGUCACCAGCGAGUAGAU | 15365 | TTCAGTCACCAGCGAGTAGAT |
| 9701 | UUCAUCCUCCAAGAUGGUCUU | 15366 | TTCATCCTCCAAGATGGTCTT |
| 9702 | UUCAUCGCUCAUGUCCUUGCA | 15367 | TTCATCGCTCATGTCCTTGCA |
| 9703 | UUCAUCUGACCAGUCCCGGCA | 15368 | TTCATCTGACCAGTCCCGGCA |
| 9704 | UUCAUCUGUUGCCCAGGCUGG | 15369 | TTCATCTGTTGCCCAGGCTGG |
| 9705 | UUCAUCUUCCAUGUUUGAGGA | 15370 | TTCATCTTCCATGTTTGAGGA |
| 9706 | UUCAUUGACACGGGCUUUCCC | 15371 | TTCATTGACACGGGCTTTCCC |
| 9707 | UUCAUUUAAGAAAUUUAAUUG | 15372 | TTCATTTAAGAAATTTAATTG |
| 9708 | UUCAUUUUUUAAGAGAUGGGG | 15373 | TTCATTTTTTAAGAGATGGGG |
| 9709 | UUCCAGCCCCAGGGCCCCAUG | 15374 | TTCCAGCCCCAGGGCCCCATG |
| 9710 | UUCCAUAGAAGGAAGACCCCC | 15375 | TTCCATAGAAGGAAGACCCCC |
| 9711 | UUCCAUCAGAGCACUGGAAUU | 15376 | TTCCATCAGAGCACTGGAATT |
| 9712 | UUCCAUGUUUGAGGAUUGUGU | 15377 | TTCCATGTTTGAGGATTGTGT |
| 9713 | UUCCCAUCGUGGCAGCGAAAC | 15378 | TTCCCATCGTGGCAGCGAAAC |
| 9714 | UUCCCCAGUCAGUCCAGUACA | 15379 | TTCCCCAGTCAGTCCAGTACA |
| 9715 | UUCCCGGGUUCACACCAUUCU | 15380 | TTCCCGGGTTCACACCATTCT |
| 9716 | UUCCCGGUCACACUGCCGGCU | 15381 | TTCCCGGTCACACTGCCGGCT |
| 9717 | UUCCCGUCUUGGCACUGGAAC | 15382 | TTCCCGTCTTGGCACTGGAAC |
| 9718 | UUCCCUGCACUGGGGGGGACA | 15383 | TTCCCTGCACTGGGGGGGACA |
| 9719 | UUCCCUGGCCUGGGAUCCCAU | 15384 | TTCCCTGGCCTGGGATCCCAT |
| 9720 | UUCCGACGCCAUGAAUCCCUU | 15385 | TTCCGACGCCATGAATCCCTT |
| 9721 | UUCCGGUUGCCCCCGUUGACA | 15386 | TTCCGGTTGCCCCCGTTGACA |
| 9722 | UUCCUCACACUGGCACUUGUA | 15387 | TTCCTCACACTGGCACTTGTA |
| 9723 | UUCCUCAGGUUGGGGAUGAGG | 15388 | TTCCTCAGGTTGGGGATGAGG |
| 9724 | UUCCUCGUCAGAUUUGUCCUU | 15389 | TTCCTCGTCAGATTTGTCCTT |
| 9725 | UUCCUCUGCCAGCAACGUCGC | 15390 | TTCCTCTGCCAGCAACGTCGC |
| 9726 | UUCCUCUUCACGCCCUUGGUA | 15391 | TTCCTCTTCACGCCCTTGGTA |
| 9727 | UUCCUGACCUCGUGCCGGUUG | 15392 | TTCCTGACCTCGTGCCGGTTG |
| 9728 | UUCCUGGAGAGAAAUGGAGGU | 15393 | TTCCTGGAGAGAAATGGAGGT |
| 9729 | UUCCUGGCUUAAGGAAGGUAC | 15394 | TTCCTGGCTTAAGGAAGGTAC |
| 9730 | UUCGCAGUCGGGGUCGUUGUC | 15395 | TTCGCAGTCGGGGTCGTTGTC |
| 9731 | UUCGCAUCUGUCGCCCACGUG | 15396 | TTCGCATCTGTCGCCCACGTG |
| 9732 | UUCGCAUCUGUCGCCCACUGC | 15397 | TTCGCATCTGTCGCCCACTGC |
| 9733 | UUCGCAUCUUCGCUGGGCCAC | 15398 | TTCGCATCTTCGCTGGGCCAC |
| 9734 | UUCGCCAGGAGGGCCCAGGAU | 15399 | TTCGCCAGGAGGGCCCAGGAT |
| 9735 | UUCGCCGCUGUGACACUUGAA | 15400 | TTCGCCGCTGTGACACTTGAA |
| 9736 | UUCGCUGGGCCACCAGCUGGA | 15401 | TTCGCTGGGCCACCAGCTGGA |
| 9737 | UUCGGGGGUGACAGGGCAAAG | 15402 | TTCGGGGGTGACAGGGCAAAG |
| 9738 | UUCGUCAGGGCGACAGGUGGC | 15403 | TTCGTCAGGGCGACAGGTGGC |
| 9739 | UUCGUGCAAAUAAUCUUUGUA | 15404 | TTCGTGCAAATAATCTTTGTA |
| 9740 | UUCGUGUGGGGGUCCAGCUGG | 15405 | TTCGTGTGGGGGTCCAGCTGG |
| 9741 | UUCGUUGAUGAUAUCUGUCCA | 15406 | TTCGTTGATGATATCTGTCCA |
| 9742 | UUCGUUGGUCCCGCACUCUUU | 15407 | TTCGTTGGTCCCGCACTCTTT |
| 9743 | UUCUAUACAGUGGUUUAAAAA | 15408 | TTCTATACAGTGGTTTAAAAA |
| 9744 | UUCUAUUGCUGGCCACCUCCG | 15409 | TTCTATTGCTGGCCACCTCCG |
| 9745 | UUCUCAUUUCCUCUGCCAGCA | 15410 | TTCTCATTTCCTCTGCCAGCA |
| 9746 | UUCUCCCAAAAAGCGUUGCAC | 15411 | TTCTCCCAAAAAGCGTTGCAC |
| 9747 | UUCUCCCUGAAUAACGUUUUC | 15412 | TTCTCCCTGAATAACGTTTTC |
| 9748 | UUCUCCUGCCUCAGCCUCCCG | 15413 | TTCTCCTGCCTCAGCCTCCCG |
| 9749 | UUCUCGAUAUUCACGAUCACG | 15414 | TTCTCGATATTCACGATCACG |
| 9750 | UUCUCUGGGACAGGUCAGACC | 15415 | TTCTCTGGGACAGGTCAGACC |
| 9751 | UUCUCUGGGCCUGACAUCCCC | 15416 | TTCTCTGGGCCTGACATCCCC |
| 9752 | UUCUCUGUCUUUGAAUAAAAC | 15417 | TTCTCTGTCTTTGAATAAAAC |
| 9753 | UUCUCUUAUCCUUCACGAGGA | 15418 | TTCTCTTATCCTTCACGAGGA |
| 9754 | UUCUGAAAUAGGGUCUUCAUC | 15419 | TTCTGAAATAGGGTCTTCATC |
| 9755 | UUCUGAGGCAACGUUUCAACC | 15420 | TTCTGAGGCAACGTTTCAACC |
| 9756 | UUCUGAUAGACGGGGUUGUCA | 15421 | TTCTGATAGACGGGGTTGTCA |
| 9757 | UUCUGCCUCCCAGAUGAAUAA | 15422 | TTCTGCCTCCCAGATGAATAA |
| 9758 | UUCUGGGCAGGGACGGGACUC | 15423 | TTCTGGGCAGGGACGGGACTC |
| 9759 | UUCUUAAGCCGCCAGUUCUUC | 15424 | TTCTTAAGCCGCCAGTTCTTC |
| 9760 | UUCUUCCAUAGAAGGAAGACC | 15425 | TTCTTCCATAGAAGGAAGACC |
| 9761 | UUCUUCUCAUUUCCUCUGCCA | 15426 | TTCTTCTCATTTCCTCTGCCA |
| 9762 | UUCUUGAUCUUGGCGGGAGUU | 15427 | TTCTTGATCTTGGCGGGAGTT |
| 9763 | UUCUUUCGCAUCUGUCGCCCA | 15428 | TTCTTTCGCATCTGTCGCCCA |
| 9764 | UUGAAAGCCACUUGCUUCUCU | 15429 | TTGAAAGCCACTTGCTTCTCT |
| 9765 | UUGAACUUGUUGGGUCCCUCG | 15430 | TTGAACTTGTTGGGTCCCTCG |
| 9766 | UUGAAGUCCCGGUCAACCUGC | 15431 | TTGAAGTCCCGGTCAACCTGC |
| 9767 | UUGAAUAAAACAAGGCCGGCG | 15432 | TTGAATAAAACAAGGCCGGCG |
| 9768 | UUGACACGGCCCCCACAGCUG | 15433 | TTGACACGGCCCCCACAGCTG |
| 9769 | UUGACACGGGCUUUCCCUGGC | 15434 | TTGACACGGGCTTTCCCTGGC |
| 9770 | UUGACAUCGAUGCUUGAGAUG | 15435 | TTGACATCGATGCTTGAGATG |
| 9771 | UUGACAUCGGAACCUGUGAGG | 15436 | TTGACATCGGAACCTGTGAGG |
| 9772 | UUGACUCCUGAGUUUAGGGGU | 15437 | TTGACTCCTGAGTTTAGGGGT |
| 9773 | UUGAGACGGAGUCUCGCUCUG | 15438 | TTGAGACGGAGTCTCGCTCTG |
| 9774 | UUGAGAUGGAGUGAAGUUUGG | 15439 | TTGAGATGGAGTGAAGTTTGG |
| 9775 | UUGAGGAUUGUGUCACGGUGG | 15440 | TTGAGGATTGTGTCACGGTGG |
| 9776 | UUGAGGGUGGCCGGGGGCCCC | 15441 | TTGAGGGTGGCCGGGGGCCCC |
| 9777 | UUGAUCACAGUAAGACAUUCA | 15442 | TTGATCACAGTAAGACATTCA |
| 9778 | UUGAUCGGGGCUGGUGGGGCG | 15443 | TTGATCGGGGCTGGTGGGGCG |
| 9779 | UUGAUCUGCGGGGCAGGGAGG | 15444 | TTGATCTGCGGGGCAGGGAGG |
| 9780 | UUGAUCUUGGCGGGAGUUCCC | 15445 | TTGATCTTGGCGGGAGTTCCC |
| 9781 | UUGAUGAUAUCUGUCCAAAAU | 15446 | TTGATGATATCTGTCCAAAAT |
| 9782 | UUGAUGCUGUUGAUGUUCUUA | 15447 | TTGATGCTGTTGATGTTCTTA |
| 9783 | UUGAUGGGUUCAUCUGACCAG | 15448 | TTGATGGGTTCATCTGACCAG |
| 9784 | UUGAUGUUCUUAAGCCGCCAG | 15449 | TTGATGTTCTTAAGCCGCCAG |
| 9785 | UUGCAAAAAUAAAUAGAUUUU | 15450 | TTGCAAAAATAAATAGATTTT |
| 9786 | UUGCACACAGUCCAGUUCGUG | 15451 | TTGCACACAGTCCAGTTCGTG |
| 9787 | UUGCACUGGAAGCUGGCGGGA | 15452 | TTGCACTGGAAGCTGGCGGGA |
| 9788 | UUGCAGACGUGGGAACAGCCG | 15453 | TTGCAGACGTGGGAACAGCCG |
| 9789 | UUGCAGACUUUGUCCAGGGUG | 15454 | TTGCAGACTTTGTCCAGGGTG |
| 9790 | UUGCAGGCCUUCGUGUGGGGG | 15455 | TTGCAGGCCTTCGTGTGGGGG |
| 9791 | UUGCAGGUGACAGACAAGCAC | 15456 | TTGCAGGTGACAGACAAGCAC |
| 9792 | UUGCAGUCAUAUUCCCGGUCA | 15457 | TTGCAGTCATATTCCCGGTCA |
| 9793 | UUGCAGUCGGGGCCACCAUCA | 15458 | TTGCAGTCGGGGCCACCATCA |
| 9794 | UUGCAUAGAAGAGGUAAACAC | 15459 | TTGCATAGAAGAGGTAAACAC |
| 9795 | UUGCAUAGAAGUGGAAGCACU | 15460 | TTGCATAGAAGTGGAAGCACT |
| 9796 | UUGCAUGGGCACUGUCCGAAG | 15461 | TTGCATGGGCACTGTCCGAAG |
| 9797 | UUGCCAAUCCCUUGUGACAUC | 15462 | TTGCCAATCCCTTGTGACATC |
| 9798 | UUGCCCAGGCUGGAAAGCAGU | 15463 | TTGCCCAGGCTGGAAAGCAGT |
| 9799 | UUGCCCAGGCUGGAGUGCAGU | 15464 | TTGCCCAGGCTGGAGTGCAGT |
| 9800 | UUGCCCCCGUUGACAUCGAUG | 15465 | TTGCCCCCGTTGACATCGATG |
| 9801 | UUGCUCAGGCCUGGUCUCCAA | 15466 | TTGCTCAGGCCTGGTCTCCAA |
| 9802 | UUGCUCAGGGUGGUCCUCUCA | 15467 | TTGCTCAGGGTGGTCCTCTCA |
| 9803 | UUGCUCGUCUGAGCCGUUGUC | 15468 | TTGCTCGTCTGAGCCGTTGTC |
| 9804 | UUGCUGGCCACCUCCGUGUCC | 15469 | TTGCTGGCCACCTCCGTGTCC |
| 9805 | UUGCUGUGGAUCCAGUCCACA | 15470 | TTGCTGTGGATCCAGTCCACA |
| 9806 | UUGCUUCUCUGGGCCUGACAU | 15471 | TTGCTTCTCTGGGCCTGACAT |
| 9807 | UUGGAACACGUAAAGACCCCU | 15472 | TTGGAACACGTAAAGACCCCT |
| 9808 | UUGGAGCCGUUCUCCCUGAAU | 15473 | TTGGAGCCGTTCTCCCTGAAT |
| 9809 | UUGGAGGCAUUUGCAUAGAAG | 15474 | TTGGAGGCATTTGCATAGAAG |
| 9810 | UUGGAGUCAACCCAGUAGAGG | 15475 | TTGGAGTCAACCCAGTAGAGG |
| 9811 | UUGGCACUGAAAAUGGCUUCG | 15476 | TTGGCACTGAAAATGGCTTCG |
| 9812 | UUGGCACUGGAACUCGUUUCU | 15477 | TTGGCACTGGAACTCGTTTCT |
| 9813 | UUGGCCAUCGCACCUCCAGAA | 15478 | TTGGCCATCGCACCTCCAGAA |
| 9814 | UUGGCGGGAGUUCCCCAGUCA | 15479 | TTGGCGGGAGTTCCCCAGTCA |
| 9815 | UUGGCUGGGUGAGGUUGUGGA | 15480 | TTGGCTGGGTGAGGTTGTGGA |
| 9816 | UUGGCUUAGAGAUUGGUGGAU | 15481 | TTGGCTTAGAGATTGGTGGAT |
| 9817 | UUGGCUUGGAGCCGUUCUCCC | 15482 | TTGGCTTGGAGCCGTTCTCCC |
| 9818 | UUGGGCCACUGAAUGUUUUCA | 15483 | TTGGGCCACTGAATGTTTTCA |
| 9819 | UUGGGCGAGUGGGGGUUGAUC | 15484 | TTGGGCGAGTGGGGGTTGATC |
| 9820 | UUGGGGAAGUGAAUGGCUUGG | 15485 | TTGGGGAAGTGAATGGCTTGG |
| 9821 | UUGGGGAUGAGGCUGGUGUAC | 15486 | TTGGGGATGAGGCTGGTGTAC |
| 9822 | UUGGGGGAGCACGUCUCCUGG | 15487 | TTGGGGGAGCACGTCTCCTGG |
| 9823 | UUGGGGGGACAGCCUUGCUCG | 15488 | TTGGGGGGACAGCCTTGCTCG |
| 9824 | UUGGGUCCCUCGCAGAGUGUC | 15489 | TTGGGTCCCTCGCAGAGTGTC |
| 9825 | UUGGUAUCCGCAACAGAGACA | 15490 | TTGGTATCCGCAACAGAGACA |
| 9826 | UUGGUCCCGCACUCUUUGAUG | 15491 | TTGGTCCCGCACTCTTTGATG |
| 9827 | UUGGUCUCGGUGCCACCACGG | 15492 | TTGGTCTCGGTGCCACCACGG |
| 9828 | UUGGUCUUCUCUGUCUUUGAA | 15493 | TTGGTCTTCTCTGTCTTTGAA |
| 9829 | UUGGUGAAGAAGAGGUAGGCG | 15494 | TTGGTGAAGAAGAGGTAGGCG |
| 9830 | UUGGUGAAUGAGUUUGGUCUC | 15495 | TTGGTGAATGAGTTTGGTCTC |
| 9831 | UUGGUGAGACAUUGUCACUAU | 15496 | TTGGTGAGACATTGTCACTAT |
| 9832 | UUGGUGCCAUCUGCUGUUGUG | 15497 | TTGGTGCCATCTGCTGTTGTG |
| 9833 | UUGGUGGAUGAGGCAGGGCCA | 15498 | TTGGTGGATGAGGCAGGGCCA |
| 9834 | UUGGUUUUUGUAGAGAUGGGA | 15499 | TTGGTTTTTGTAGAGATGGGA |
| 9835 | UUGUACAUAAAGAAGAGGCAU | 15500 | TTGTACATAAAGAAGAGGCAT |
| 9836 | UUGUAGAGAUGGGAUCUCGCU | 15501 | TTGTAGAGATGGGATCTCGCT |
| 9837 | UUGUAGCCACCCUCCAGGUUC | 15502 | TTGTAGCCACCCTCCAGGTTC |
| 9838 | UUGUAGGAGAUGCAUUUCCCG | 15503 | TTGTAGGAGATGCATTTCCCG |
| 9839 | UUGUAUUUCUGAAAUAGGGUC | 15504 | TTGTATTTCTGAAATAGGGTC |
| 9840 | UUGUAUUUUUAGUAGAGACGG | 15505 | TTGTATTTTTAGTAGAGACGG |
| 9841 | UUGUCAAAGUUGAUGCUGUUG | 15506 | TTGTCAAAGTTGATGCTGTTG |
| 9842 | UUGUCACUAUCUCCACCGUGG | 15507 | TTGTCACTATCTCCACCGTGG |
| 9843 | UUGUCCAAGCAUUCGUUGGUC | 15508 | TTGTCCAAGCATTCGTTGGTC |
| 9844 | UUGUCCAGGGUGAUGCAUUCG | 15509 | TTGTCCAGGGTGATGCATTCG |
| 9845 | UUGUCCCUGGGGACAAUUGCC | 15510 | TTGTCCCTGGGGACAATTGCC |
| 9846 | UUGUCCUCAAAGACGGCCAAG | 15511 | TTGTCCTCAAAGACGGCCAAG |
| 9847 | UUGUCCUUGCAGUCGGGGCCA | 15512 | TTGTCCTTGCAGTCGGGGCCA |
| 9848 | UUGUCGCAGGCCCACAGCUGG | 15513 | TTGTCGCAGGCCCACAGCTGG |
| 9849 | UUGUCGCAGUCCACUUGGCCA | 15514 | TTGTCGCAGTCCACTTGGCCA |
| 9850 | UUGUCGUCGCCUUUGUGACAG | 15515 | TTGTCGTCGCCTTTGTGACAG |
| 9851 | UUGUGACAGGAACCGCGGAGG | 15516 | TTGTGACAGGAACCGCGGAGG |
| 9852 | UUGUGACAUCUUCACGCGGGA | 15517 | TTGTGACATCTTCACGCGGGA |
| 9853 | UUGUGGAAGAGAACCAUAUCC | 15518 | TTGTGGAAGAGAACCATATCC |
| 9854 | UUGUGGCAAAUGUGGACCUCA | 15519 | TTGTGGCAAATGTGGACCTCA |
| 9855 | UUGUGUCACGGUGGAGAGAAA | 15520 | TTGTGTCACGGTGGAGAGAAA |
| 9856 | UUGUGUGCUGUGUCCUUACGG | 15521 | TTGTGTGCTGTGTCCTTACGG |
| 9857 | UUGUGUGUUGAAAGCCACUUG | 15522 | TTGTGTGTTGAAAGCCACTTG |
| 9858 | UUGUUGCUCAGGCCUGGUCUC | 15523 | TTGTTGCTCAGGCCTGGTCTC |
| 9859 | UUGUUGGGUCCCUCGCAGAGU | 15524 | TTGTTGGGTCCCTCGCAGAGT |
| 9860 | UUGUUGUCCAAGCAUUCGUUG | 15525 | TTGTTGTCCAAGCATTCGTTG |
| 9861 | UUGUUUUUUUUUUUUGAGACG | 15526 | TTGTTTTTTTTTTTTGAGACG |
| 9862 | UUUAAAAAGUGACACCCAUCU | 15527 | TTTAAAAAGTGACACCCATCT |
| 9863 | UUUAAACACAUACCCAUCAAC | 15528 | TTTAAACACATACCCATCAAC |
| 9864 | UUUAACUUUUUGGUUUUUGUA | 15529 | TTTAACTTTTTGGTTTTTGTA |
| 9865 | UUUAAGAAAUUUAAUUGAUCA | 15530 | TTTAAGAAATTTAATTGATCA |
| 9866 | UUUAAGAGAUGGGGUCUUACU | 15531 | TTTAAGAGATGGGGTCTTACT |
| 9867 | UUUAAUUGAUCACAGUAAGAC | 15532 | TTTAATTGATCACAGTAAGAC |
| 9868 | UUUACGUGCUCCGAAACCAGA | 15533 | TTTACGTGCTCCGAAACCAGA |
| 9869 | UUUAGCCUGACGGUGGAUGUC | 15534 | TTTAGCCTGACGGTGGATGTC |
| 9870 | UUUAGGGGUUUGGCUUAGAGA | 15535 | TTTAGGGGTTTGGCTTAGAGA |
| 9871 | UUUAGUAGAGACGGGGUUUCA | 15536 | TTTAGTAGAGACGGGGTTTCA |
| 9872 | UUUAUAGUUGUAUUUCUGAAA | 15537 | TTTATAGTTGTATTTCTGAAA |
| 9873 | UUUAUAUAUAUGUGUGUAUAU | 15538 | TTTATATATATGTGTGTATAT |
| 9874 | UUUAUUUAUUUUUUUAUAGUU | 15539 | TTTATTTATTTTTTTATAGTT |
| 9875 | UUUAUUUUUUUAUAGUUGUAU | 15540 | TTTATTTTTTTATAGTTGTAT |
| 9876 | UUUCAACCAAUAUACAAAGUG | 15541 | TTTCAACCAATATACAAAGTG |
| 9877 | UUUCAACCUCGUAAGGAACCG | 15542 | TTTCAACCTCGTAAGGAACCG |
| 9878 | UUUCACGUGUUAGCCAGGAUG | 15543 | TTTCACGTGTTAGCCAGGATG |
| 9879 | UUUCAGAAAGAACCUGAAGUC | 15544 | TTTCAGAAAGAACCTGAAGTC |
| 9880 | UUUCAGAGGCAAUAACCCCCU | 15545 | TTTCAGAGGCAATAACCCCCT |
| 9881 | UUUCAGCCAACAAGUUGACAU | 15546 | TTTCAGCCAACAAGTTGACAT |
| 9882 | UUUCAGUCACCAGCGAGUAGA | 15547 | TTTCAGTCACCAGCGAGTAGA |
| 9883 | UUUCAUCCUCCAAGAUGGUCU | 15548 | TTTCATCCTCCAAGATGGTCT |
| 9884 | UUUCAUCUUCCAUGUUUGAGG | 15549 | TTTCATCTTCCATGTTTGAGG |
| 9885 | UUUCCAGCCCCAGGGCCCCAU | 15550 | TTTCCAGCCCCAGGGCCCCAT |
| 9886 | UUUCCAUCAGAGCACUGGAAU | 15551 | TTTCCATCAGAGCACTGGAAT |
| 9887 | UUUCCCGUCUUGGCACUGGAA | 15552 | TTTCCCGTCTTGGCACTGGAA |
| 9888 | UUUCCCUGGCCUGGGAUCCCA | 15553 | TTTCCCTGGCCTGGGATCCCA |
| 9889 | UUUCCGACGCCAUGAAUCCCU | 15554 | TTTCCGACGCCATGAATCCCT |
| 9890 | UUUCCUCGUCAGAUUUGUCCU | 15555 | TTTCCTCGTCAGATTTGTCCT |
| 9891 | UUUCCUCUGCCAGCAACGUCG | 15556 | TTTCCTCTGCCAGCAACGTCG |
| 9892 | UUUCCUCUUCACGCCCUUGGU | 15557 | TTTCCTCTTCACGCCCTTGGT |
| 9893 | UUUCCUGGCUUAAGGAAGGUA | 15558 | TTTCCTGGCTTAAGGAAGGTA |
| 9894 | UUUCGCAUCUGUCGCCCACGU | 15559 | TTTCGCATCTGTCGCCCACGT |
| 9895 | UUUCGCAUCUGUCGCCCACUG | 15560 | TTTCGCATCTGTCGCCCACTG |
| 9896 | UUUCUCUUAUCCUUCACGAGG | 15561 | TTTCTCTTATCCTTCACGAGG |
| 9897 | UUUCUGAAAUAGGGUCUUCAU | 15562 | TTTCTGAAATAGGGTCTTCAT |
| 9898 | UUUCUUGAUCUUGGCGGGAGU | 15563 | TTTCTTGATCTTGGCGGGAGT |
| 9899 | UUUCUUUCGCAUCUGUCGCCC | 15564 | TTTCTTTCGCATCTGTCGCCC |
| 9900 | UUUGAAGUCCCGGUCAACCUG | 15565 | TTTGAAGTCCCGGTCAACCTG |
| 9901 | UUUGAAUAAAACAAGGCCGGC | 15566 | TTTGAATAAAACAAGGCCGGC |
| 9902 | UUUGAGACGGAGUCUCGCUCU | 15567 | TTTGAGACGGAGTCTCGCTCT |
| 9903 | UUUGAGGAUUGUGUCACGGUG | 15568 | TTTGAGGATTGTGTCACGGTG |
| 9904 | UUUGAUGGGUUCAUCUGACCA | 15569 | TTTGATGGGTTCATCTGACCA |
| 9905 | UUUGCAAAAAUAAAUAGAUUU | 15570 | TTTGCAAAAATAAATAGATTT |
| 9906 | UUUGCAGGUGACAGACAAGCA | 15571 | TTTGCAGGTGACAGACAAGCA |
| 9907 | UUUGCAUAGAAGUGGAAGCAC | 15572 | TTTGCATAGAAGTGGAAGCAC |
| 9908 | UUUGGAGUCAACCCAGUAGAG | 15573 | TTTGGAGTCAACCCAGTAGAG |
| 9909 | UUUGGCUUAGAGAUUGGUGGA | 15574 | TTTGGCTTAGAGATTGGTGGA |
| 9910 | UUUGGUCUCGGUGCCACCACG | 15575 | TTTGGTCTCGGTGCCACCACG |
| 9911 | UUUGGUCUUCUCUGUCUUUGA | 15576 | TTTGGTCTTCTCTGTCTTTGA |
| 9912 | UUUGGUGAAUGAGUUUGGUCU | 15577 | TTTGGTGAATGAGTTTGGTCT |
| 9913 | UUUGGUUUUUGUAGAGAUGGG | 15578 | TTTGGTTTTTGTAGAGATGGG |
| 9914 | UUUGUACAUAAAGAAGAGGCA | 15579 | TTTGTACATAAAGAAGAGGCA |
| 9915 | UUUGUAGAGAUGGGAUCUCGC | 15580 | TTTGTAGAGATGGGATCTCGC |
| 9916 | UUUGUAUUUUUAGUAGAGACG | 15581 | TTTGTATTTTTAGTAGAGACG |
| 9917 | UUUGUCCAGGGUGAUGCAUUC | 15582 | TTTGTCCAGGGTGATGCATTC |
| 9918 | UUUGUCCCUGGGGACAAUUGC | 15583 | TTTGTCCCTGGGGACAATTGC |
| 9919 | UUUGUCCUCAAAGACGGCCAA | 15584 | TTTGTCCTCAAAGACGGCCAA |
| 9920 | UUUGUCCUUGCAGUCGGGGCC | 15585 | TTTGTCCTTGCAGTCGGGGCC |
| 9921 | UUUGUGACAGGAACCGCGGAG | 15586 | TTTGTGACAGGAACCGCGGAG |
| 9922 | UUUGUUGCUCAGGCCUGGUCU | 15587 | TTTGTTGCTCAGGCCTGGTCT |
| 9923 | UUUGUUUUUUUUUUUUGAGAC | 15588 | TTTGTTTTTTTTTTTTGAGAC |
| 9924 | UUUUAAACACAUACCCAUCAA | 15589 | TTTTAAACACATACCCATCAA |
| 9925 | UUUUAACUUUUUGGUUUUUGU | 15590 | TTTTAACTTTTTGGTTTTTGT |
| 9926 | UUUUAAGAGAUGGGGUCUUAC | 15591 | TTTTAAGAGATGGGGTCTTAC |
| 9927 | UUUUAGUAGAGACGGGGUUUC | 15592 | TTTTAGTAGAGACGGGGTTTC |
| 9928 | UUUUAUAGUUGUAUUUCUGAA | 15593 | TTTTATAGTTGTATTTCTGAA |
| 9929 | UUUUAUAUAUAUGUGUGUAUA | 15594 | TTTTATATATATGTGTGTATA |
| 9930 | UUUUCAGCCAACAAGUUGACA | 15595 | TTTTCAGCCAACAAGTTGACA |
| 9931 | UUUUCAGUCACCAGCGAGUAG | 15596 | TTTTCAGTCACCAGCGAGTAG |
| 9932 | UUUUCAUCCUCCAAGAUGGUC | 15597 | TTTTCATCCTCCAAGATGGTC |
| 9933 | UUUUCCUCGUCAGAUUUGUCC | 15598 | TTTTCCTCGTCAGATTTGTCC |
| 9934 | UUUUCCUCUUCACGCCCUUGG | 15599 | TTTTCCTCTTCACGCCCTTGG |
| 9935 | UUUUGAGACGGAGUCUCGCUC | 15600 | TTTTGAGACGGAGTCTCGCTC |
| 9936 | UUUUGGUUUUUGUAGAGAUGG | 15601 | TTTTGGTTTTTGTAGAGATGG |
| 9937 | UUUUGUAGAGAUGGGAUCUCG | 15602 | TTTTGTAGAGATGGGATCTCG |
| 9938 | UUUUGUAUUUUUAGUAGAGAC | 15603 | TTTTGTATTTTTAGTAGAGAC |
| 9939 | UUUUGUCCCUGGGGACAAUUG | 15604 | TTTTGTCCCTGGGGACAATTG |
| 9940 | UUUUGUUUUUUUUUUUUGAGA | 15605 | TTTTGTTTTTTTTTTTTGAGA |
| 9941 | UUUUUAACUUUUUGGUUUUUG | 15606 | TTTTTAACTTTTTGGTTTTTG |
| 9942 | UUUUUAAGAGAUGGGGUCUUA | 15607 | TTTTTAAGAGATGGGGTCTTA |
| 9943 | UUUUUAGUAGAGACGGGGUUU | 15608 | TTTTTAGTAGAGACGGGGTTT |
| 9944 | UUUUUAUAGUUGUAUUUCUGA | 15609 | TTTTTATAGTTGTATTTCTGA |
| 9945 | UUUUUGAGACGGAGUCUCGCU | 15610 | TTTTTGAGACGGAGTCTCGCT |
| 9946 | UUUUUGGUUUUUGUAGAGAUG | 15611 | TTTTTGGTTTTTGTAGAGATG |
| 9947 | UUUUUGUAGAGAUGGGAUCUC | 15612 | TTTTTGTAGAGATGGGATCTC |
| 9948 | UUUUUGUAUUUUUAGUAGAGA | 15613 | TTTTTGTATTTTTAGTAGAGA |
| 9949 | UUUUUGUUUUUUUUUUUUGAG | 15614 | TTTTTGTTTTTTTTTTTTGAG |
| 9950 | UUUUUUAAGAGAUGGGGUCUU | 15615 | TTTTTTAAGAGATGGGGTCTT |
| 9951 | UUUUUUAUAGUUGUAUUUCUG | 15616 | TTTTTTATAGTTGTATTTCTG |
| 9952 | UUUUUUGAGACGGAGUCUCGC | 15617 | TTTTTTGAGACGGAGTCTCGC |
| 9953 | UUUUUUGUAUUUUUAGUAGAG | 15618 | TTTTTTGTATTTTTAGTAGAG |
| 9954 | UUUUUUGUUUUUUUUUUUUGA | 15619 | TTTTTTGTTTTTTTTTTTTGA |
| 9955 | UUUUUUUAUAGUUGUAUUUCU | 15620 | TTTTTTTATAGTTGTATTTCT |
| 9956 | UUUUUUUGAGACGGAGUCUCG | 15621 | TTTTTTTGAGACGGAGTCTCG |
| 9957 | UUUUUUUGUUUUUUUUUUUUG | 15622 | TTTTTTTGTTTTTTTTTTTTG |
| 9958 | UUUUUUUUGAGACGGAGUCUC | 15623 | TTTTTTTTGAGACGGAGTCTC |
| 9959 | UUUUUUUUGUUUUUUUUUUUU | 15624 | TTTTTTTTGTTTTTTTTTTTT |
| 9960 | UUUUUUUUUGAGACGGAGUCU | 15625 | TTTTTTTTTGAGACGGAGTCT |
| 9961 | UUUUUUUUUGUUUUUUUUUUU | 15626 | TTTTTTTTTGTTTTTTTTTTT |
| 9962 | UUUUUUUUUUGAGACGGAGUC | 15627 | TTTTTTTTTTGAGACGGAGTC |
| 9963 | UUUUUUUUUUUGAGACGGAGU | 15628 | TTTTTTTTTTTGAGACGGAGT |
| 9964 | UUUUUUUUUUUUGAGACGGAG | 15629 | TTTTTTTTTTTTGAGACGGAG |

The application's sequence listing, which the Patent Office published only in electronic form, follows.

SEQUENCE LISTING (15629 sequences)

SEQ ID NO: 1 - DNA, 22 bp, synthetic construct
  misc_feature 1..22: note = Synthetic
  source 1..22: mol_type = other DNA
gcaatgctgctgtcttcttgct

SEQ ID NO: 2 - DNA, 22 bp, synthetic construct
  misc_feature 1..22: note = Synthetic
  source 1..22: mol_type = other DNA
aacaaaatgtacaaggaccgac

SEQ ID NO: 3 - DNA, 22 bp, synthetic construct
  misc_feature 1..22: note = Synthetic
  source 1..22: mol_type = other DNA
tgcaaagtgcaacgcctgtgga

SEQ ID NO: 4 - DNA, 22 bp, synthetic construct
  misc_feature 1..22: note = Synthetic
  source 1..22: mol_type = other DNA
atagtctacaacaaagctcagg

SEQ ID NO: 5 - DNA, 22 bp, synthetic construct
  misc_feature 1..22: note = Synthetic
  source 1..22: mol_type = other DNA
ctgttttaaaatttttatatta

SEQ ID NO: 6 - DNA, 22 bp, synthetic construct
  misc_feature 1..22: note = Synthetic
  source 1..22: mol_type = other DNA
atttagcatgttcccaattctc

SEQ ID NO: 7 - DNA, 22 bp, synthetic construct
  misc_feature 1..22: note = Synthetic
  source 1..22: mol_type = other DNA
aatcgcctgcaggtaaaagcat

SEQ ID NO: 8 - DNA, 22 bp, synthetic construct
  misc_feature 1..22: note = Synthetic
  source 1..22: mol_type = other DNA
tctcagaaagacacaaattcct

SEQ ID NO: 9 - DNA, 22 bp, synthetic construct
  misc_feature 1..22: note = Synthetic
  source 1..22: mol_type = other DNA
tcaggcttcccaatttttcctg

SEQ ID NO: 10 - DNA, 22 bp, synthetic construct
  misc_feature 1..22: note = Synthetic
  source 1..22: mol_type = other DNA
tagaatactggcatctgttttt

SEQ ID NO: 11 - DNA, 22 bp, synthetic construct
  misc_feature 1..22: note = Synthetic
  source 1..22: mol_type = other DNA
tggcatctgtttttgaggattg

SEQ ID NO: 12 - DNA, 22 bp, synthetic construct
  misc_feature 1..22: note = Synthetic
  source 1..22: mol_type = other DNA
ttgccgctgcccaatgccatcc

SEQ ID NO: 13 - DNA, 22 bp, synthetic construct
  misc_feature 1..22: note = Synthetic
  source 1..22: mol_type = other DNA
gaggtagggcgacagatctaat

SEQ ID NO: 14 - DNA, 22 bp, synthetic construct
  misc_feature 1..22: note = Synthetic
  source 1..22: mol_type = other DNA
tctacaggaaaaattgggaagc

SEQ ID NO: 15 - DNA, 22 bp, synthetic construct
  misc_feature 1..22: note = Synthetic
  source 1..22: mol_type = other DNA
gcggcaaactgttgtcagaaca

SEQ ID NO: 16 - DNA, 22 bp, synthetic construct
  misc_feature 1..22: note = Synthetic
  source 1..22: mol_type = other DNA
ttttggtatcttacaggaactc

SEQ ID NO: 17 - DNA, 22 bp, synthetic construct
  misc_feature 1..22: note = Synthetic
  source 1..22: mol_type = other DNA
actattggagcctgtaagtata

SEQ ID NO: 18 - DNA, 22 bp, synthetic construct
  misc_feature 1..22: note = Synthetic
  source 1..22: mol_type = other DNA
aggaagttagaagatctgagct

SEQ ID NO: 19 - DNA, 22 bp, synthetic construct
  misc_feature 1..22: note = Synthetic
  source 1..22: mol_type = other DNA
tagtaaccacaggttgtgtcac

SEQ ID NO: 20 - DNA, 22 bp, synthetic construct
  misc_feature 1..22: note = Synthetic
  source 1..22: mol_type = other DNA
gttgtgtcaccagagtaacagt

SEQ ID NO: 21 - DNA, 22 bp, synthetic construct
  misc_feature 1..22: note = Synthetic
  source 1..22: mol_type = other DNA
tctgagtaggagctaaaatatt

SEQ ID NO: 22 - DNA, 22 bp, synthetic construct
  misc_feature 1..22: note = Synthetic
  source 1..22: mol_type = other DNA
gagggtgatggtgggtgacctt

SEQ ID NO: 23 - DNA, 22 bp, synthetic construct
  misc_feature 1..22: note = Synthetic
  source 1..22: mol_type = other DNA
tataaaatcacagagggtgatg

SEQ ID NO: 24 - DNA, 22 bp, synthetic construct
  misc_feature 1..22: note = Synthetic
  source 1..22: mol_type = other DNA
ttgatcaagttataaaatcaca

SEQ ID NO: 25 - DNA, 22 bp, synthetic construct
  misc_feature 1..22: note = Synthetic
  source 1..22: mol_type = other DNA
ccttggtttctgtgattttctt

SEQ ID NO: 26 - DNA, 22 bp, synthetic construct
  misc_feature 1..22: note = Synthetic
  source 1..22: mol_type = other DNA
tccttagcttccagccattgtg

SEQ ID NO: 27 - DNA, 22 bp, synthetic construct
  misc_feature 1..22: note = Synthetic
  source 1..22: mol_type = other DNA
cttgtacttcatcccactgatt

SEQ ID NO: 28 - DNA, 22 bp, synthetic construct
  misc_feature 1..22: note = Synthetic
  source 1..22: mol_type = other DNA
actgattctgaattctttcaac

SEQ ID NO: 29 - DNA, 22 bp, synthetic construct
  misc_feature 1..22: note = Synthetic
  source 1..22: mol_type = other DNA
agccaagcttgagtcatggaag

SEQ ID NO: 30 - DNA, 22 bp, synthetic construct
  misc_feature 1..22: note = Synthetic
  source 1..22: mol_type = other DNA
ttaggacaggccagagccaagc

SEQ ID NO: 31 - DNA, 22 bp, synthetic construct
  misc_feature 1..22: note = Synthetic
  source 1..22: mol_type = other DNA
gcaacagttgaatgaaatgtta

SEQ ID NO: 32 - DNA, 22 bp, synthetic construct
  misc_feature 1..22: note = Synthetic
  source 1..22: mol_type = other DNA
ccttcagaaccggaggcaacag

SEQ ID NO: 33 - DNA, 22 bp, synthetic construct
  misc_feature 1..22: note = Synthetic
  source 1..22: mol_type = other DNA
agttgaaagaattcagaatcag

SEQ ID NO: 34 - DNA, 22 bp, synthetic construct
  misc_feature 1..22: note = Synthetic
  source 1..22: mol_type = other DNA
ttttattctagttgaaagaatt

SEQ ID NO: 35 - DNA, 22 bp, synthetic construct
  misc_feature 1..22: note = Synthetic
  source 1..22: mol_type = other DNA
tttttccttttattctagttga

SEQ ID NO: 36-99 - skipped (64 entries)

SEQ ID NO: 100 - DNA, 22 bp, synthetic construct
  misc_feature 1..22: note = Synthetic
  source 1..22: mol_type = other DNA
atatatgtgttacctacccttg

SEQ ID NO: 101 - DNA, 22 bp, synthetic construct
  misc_feature 1..22: note = Synthetic
  source 1..22: mol_type = other DNA
acattttgttaactttttccca

SEQ ID NO: 102 - DNA, 22 bp, synthetic construct
  misc_feature 1..22: note = Synthetic
  source 1..22: mol_type = other DNA
ctttttcccattggaaatcaag

SEQ ID NO: 103 - DNA, 22 bp, synthetic construct
  misc_feature 1..22: note = Synthetic
  source 1..22: mol_type = other DNA
tttttcccattggaaatcaagc

SEQ ID NO: 104 - DNA, 22 bp, synthetic construct
  misc_feature 1..22: note = Synthetic
  source 1..22: mol_type = other DNA
tcctgtagcttcaccctttcca

SEQ ID NO: 105 - DNA, 22 bp, synthetic construct
  misc_feature 1..22: note = Synthetic
  source 1..22: mol_type = other DNA
aatgtacaaggaccgacaaggg

SEQ ID NO: 106 - DNA, 22 bp, synthetic construct
  misc_feature 1..22: note = Synthetic
  source 1..22: mol_type = other DNA
acaaaatgtacaaggaccgaca

SEQ ID NO: 107 - DNA, 22 bp, synthetic construct
  misc_feature 1..22: note = Synthetic
  source 1..22: mol_type = other DNA
aacaaaatgtacaaggaccgac

SEQ ID NO: 108 - DNA, 22 bp, synthetic construct
  misc_feature 1..22: note = Synthetic
  source 1..22: mol_type = other DNA
ggaaaaagttaacaaaatgtac

SEQ ID NO: 109 - DNA, 22 bp, synthetic construct
  misc_feature 1..22: note = Synthetic
  source 1..22: mol_type = other DNA
tctctcccagcttgatttccaa

SEQ ID NO: 110 - DNA, 22 bp, synthetic construct
  misc_feature 1..22: note = Synthetic
  source 1..22: mol_type = other DNA
ctctctcccagcttgatttcca

SEQ ID NO: 111 - DNA, 22 bp, synthetic construct
  misc_feature 1..22: note = Synthetic
  source 1..22: mol_type = other DNA
gcctgtggaaagggtgaagcta

SEQ ID NO: 112 - DNA, 22 bp, synthetic construct
  misc_feature 1..22: note = Synthetic
  source 1..22: mol_type = other DNA
gcaaagtgcaacgcctgtggaa

SEQ ID NO: 113 - DNA, 22 bp, synthetic construct
  misc_feature 1..22: note = Synthetic
  source 1..22: mol_type = other DNA
tgcaaagtgcaacgcctgtgga

SEQ ID NO: 114 - DNA, 22 bp, synthetic construct
  misc_feature 1..22: note = Synthetic
  source 1..22: mol_type = other DNA
agcattgcaaagtgcaacgcct

SEQ ID NO: 115 - DNA, 22 bp, synthetic construct
  misc_feature 1..22: note = Synthetic
  source 1..22: mol_type = other DNA
atagtctacaacaaagctcagg

SEQ ID NO: 116 - DNA, 22 bp, synthetic construct
  misc_feature 1..22: note = Synthetic
  source 1..22: mol_type = other DNA
aaagatagtctacaacaaagct

SEQ ID NO: 117 - DNA, 22 bp, synthetic construct
  misc_feature 1..22: note = Synthetic
  source 1..22: mol_type = other DNA
tatttagcatgttcccaattct

SEQ ID NO: 118 - DNA, 22 bp, synthetic construct
  misc_feature 1..22: note = Synthetic
  source 1..22: mol_type = other DNA
aacagatctgtcaaatcgcctg

SEQ ID NO: 119 - DNA, 22 bp, synthetic construct
  misc_feature 1..22: note = Synthetic
  source 1..22: mol_type = other DNA
aatcgcctgcaggtaaaagcat

SEQ ID NO: 120 - DNA, 22 bp, synthetic construct
  misc_feature 1..22: note = Synthetic
  source 1..22: mol_type = other DNA
tgctaaatacaaatggtatctt

SEQ ID NO: 121 - DNA, 22 bp, synthetic construct
  misc_feature 1..22: note = Synthetic
  source 1..22: mol_type = other DNA
attgggaacatgctaaatacaa

SEQ ID NO: 122 - DNA, 22 bp, synthetic construct
  misc_feature 1..22: note = Synthetic
  source 1..22: mol_type = other DNA
aaagacacaaattcctgagaat

SEQ ID NO: 123 - DNA, 22 bp, synthetic construct
  misc_feature 1..22: note = Synthetic
  source 1..22: mol_type = other DNA
gaaagacacaaattcctgagaa

SEQ ID NO: 124 - DNA, 22 bp, synthetic construct
  misc_feature 1..22: note = Synthetic
  source 1..22: mol_type = other DNA
atgatataaagatatttaatca

SEQ ID NO: 125 - DNA, 22 bp, synthetic construct
  misc_feature 1..22: note = Synthetic
  source 1..22: mol_type = other DNA
ttgacagatctgttgagaaatg

SEQ ID NO: 126 - DNA, 22 bp, synthetic construct
  misc_feature 1..22: note = Synthetic
  source 1..22: mol_type = other DNA
gatttgacagatctgttgagaa

SEQ ID NO: 127 - DNA, 22 bp, synthetic construct
  misc_feature 1..22: note = Synthetic
  source 1..22: mol_type = other DNA
ttgatccatatgcttttacctg

SEQ ID NO: 128 - DNA, 22 bp, synthetic construct
  misc_feature 1..22: note = Synthetic
  source 1..22: mol_type = other DNA
agacctcctgccaccgcagatt

SEQ ID NO: 129 - DNA, 22 bp, synthetic construct
  misc_feature 1..22: note = Synthetic
  source 1..22: mol_type = other DNA
tcccaatttttcctgtagaata

SEQ ID NO: 130 - DNA, 22 bp, synthetic construct
  misc_feature 1..22: note = Synthetic
  source 1..22: mol_type = other DNA
tagaatactggcatctgttttt

SEQ ID NO: 131 - DNA, 22 bp, synthetic construct
  misc_feature 1..22: note = Synthetic
  source 1..22: mol_type = other DNA
tttgccgctgcccaatgccatc

SEQ ID NO: 132 - DNA, 22 bp, synthetic construct
  misc_feature 1..22: note = Synthetic
  source 1..22: mol_type = other DNA
ggagttcctgtaagataccaaa

SEQ ID NO: 133 - DNA, 22 bp, synthetic construct
  misc_feature 1..22: note = Synthetic
  source 1..22: mol_type = other DNA
agaggtagggcgacagatctaa

SEQ ID NO: 134 - DNA, 22 bp, synthetic construct
  misc_feature 1..22: note = Synthetic
  source 1..22: mol_type = other DNA
ctgtcagacagaaaaaagaggt

SEQ ID NO: 135 - DNA, 22 bp, synthetic construct
  misc_feature 1..22: note = Synthetic
  source 1..22: mol_type = other DNA
gctgtcagacagaaaaaagagg

SEQ ID NO: 136 - DNA, 22 bp, synthetic construct
  misc_feature 1..22: note = Synthetic
  source 1..22: mol_type = other DNA
aacagctgtcagacagaaaaaa

SEQ ID NO: 137 - DNA, 22 bp, synthetic construct
  misc_feature 1..22: note = Synthetic
  source 1..22: mol_type = other DNA
aagcctgaatctgcggtggcag

SEQ ID NO: 138 - DNA, 22 bp, synthetic construct
  misc_feature 1..22: note = Synthetic
  source 1..22: mol_type = other DNA
gggaagcctgaatctgcggtgg

SEQ ID NO: 139 - DNA, 22 bp, synthetic construct
  misc_feature 1..22: note = Synthetic
  source 1..22: mol_type = other DNA
aattgggaagcctgaatctgcg

SEQ ID NO: 140 - DNA, 22 bp, synthetic construct
  misc_feature 1..22: note = Synthetic
  source 1..22: mol_type = other DNA
aaaaattgggaagcctgaatct

SEQ ID NO: 141 - DNA, 22 bp, synthetic construct
  misc_feature 1..22: note = Synthetic
  source 1..22: mol_type = other DNA
gccagtattctacaggaaaaat

SEQ ID NO: 142 - DNA, 22 bp, synthetic construct
  misc_feature 1..22: note = Synthetic
  source 1..22: mol_type = other DNA
tgccagtattctacaggaaaaa

SEQ ID NO: 143 - DNA, 22 bp, synthetic construct
  misc_feature 1..22: note = Synthetic
  source 1..22: mol_type = other DNA
aaaaacagatgccagtattcta

SEQ ID NO: 144 - DNA, 22 bp, synthetic construct
  misc_feature 1..22: note = Synthetic
  source 1..22: mol_type = other DNA
tgtcagaacattgaatgcaact

SEQ ID NO: 145 - DNA, 22 bp, synthetic construct
  misc_feature 1..22: note = Synthetic
  source 1..22: mol_type = other DNA
ttgtcagaacattgaatgcaac

SEQ ID NO: 146 - DNA, 22 bp, synthetic construct
  misc_feature 1..22: note = Synthetic
  source 1..22: mol_type = other DNA
gttgtcagaacattgaatgcaa

SEQ ID NO: 147 - DNA, 22 bp, synthetic construct
  misc_feature 1..22: note = Synthetic
  source 1..22: mol_type = other DNA
aactccaggatggcattgggca

SEQ ID NO: 148 - DNA, 22 bp, synthetic construct
  misc_feature 1..22: note = Synthetic
  source 1..22: mol_type = other DNA
tacaggaactccaggatggcat

SEQ ID NO: 149 - DNA, 22 bp, synthetic construct
  misc_feature 1..22: note = Synthetic
  source 1..22: mol_type = other DNA
ttacaggaactccaggatggca

SEQ ID NO: 150 - DNA, 22 bp, synthetic construct
  misc_feature 1..22: note = Synthetic
  source 1..22: mol_type = other DNA
ggtatcttacaggaactccagg

SEQ ID NO: 151 - DNA, 22 bp, synthetic construct
  misc_feature 1..22: note = Synthetic
  source 1..22: mol_type = other DNA
ttttggtatcttacaggaactc

SEQ ID NO: 152 - DNA, 22 bp, synthetic construct
  misc_feature 1..22: note = Synthetic
  source 1..22: mol_type = other DNA
gttttgcctttttggtatctta

SEQ ID NO: 153 - DNA, 22 bp, synthetic construct
  misc_feature 1..22: note = Synthetic
  source 1..22: mol_type = other DNA
tcttttctcaaataaaaagaca

SEQ ID NO: 154 - DNA, 22 bp, synthetic construct
  misc_feature 1..22: note = Synthetic
  source 1..22: mol_type = other DNA
agaatgggatccagtatactta

SEQ ID NO: 155 - DNA, 22 bp, synthetic construct
  misc_feature 1..22: note = Synthetic
  source 1..22: mol_type = other DNA
agtatacttacaggctccaata

SEQ ID NO: 156 - DNA, 22 bp, synthetic construct
  misc_feature 1..22: note = Synthetic
  source 1..22: mol_type = other DNA
caggctccaatagtggtcagtc

SEQ ID NO: 157 - DNA, 22 bp, synthetic construct
  misc_feature 1..22: note = Synthetic
  source 1..22: mol_type = other DNA
caatagtggtcagtccaggagc

SEQ ID NO: 158 - DNA, 22 bp, synthetic construct
  misc_feature 1..22: note = Synthetic
  source 1..22: mol_type = other DNA
gtggtcagtccaggagctaggt

SEQ ID NO: 159 - DNA, 22 bp, synthetic construct
  misc_feature 1..22: note = Synthetic
  source 1..22: mol_type = other DNA
ttgccctcagctcttgaagtaa

SEQ ID NO: 160 - DNA, 22 bp, synthetic construct
  misc_feature 1..22: note = Synthetic
  source 1..22: mol_type = other DNA
agtatactggatcccattctct

SEQ ID NO: 161 - DNA, 22 bp, synthetic construct
  misc_feature 1..22: note = Synthetic
  source 1..22: mol_type = other DNA
actattggagcctgtaagtata

SEQ ID NO: 162 - DNA, 22 bp, synthetic construct
  misc_feature 1..22: note = Synthetic
  source 1..22: mol_type = other DNA
ctagctcctggactgaccacta

SEQ ID NO: 163 - DNA, 22 bp, synthetic construct
  misc_feature 1..22: note = Synthetic
  source 1..22: mol_type = other DNA
gcaaagcagcctgacctagctc

SEQ ID NO: 164 - DNA, 22 bp, synthetic construct
  misc_feature 1..22: note = Synthetic
  source 1..22: mol_type = other DNA
aaaccgtttacttcaagagctg

SEQ ID NO: 165 - DNA, 22 bp, synthetic construct
  misc_feature 1..22: note = Synthetic
  source 1..22: mol_type = other DNA
taaaccgtttacttcaagagct

SEQ ID NO: 166 - DNA, 22 bp, synthetic construct
  misc_feature 1..22: note = Synthetic
  source 1..22: mol_type = other DNA
agatctgagctctgagtggaag

SEQ ID NO: 167 - DNA, 22 bp, synthetic construct
  misc_feature 1..22: note = Synthetic
  source 1..22: mol_type = other DNA
agaagatctgagctctgagtgg

SEQ ID NO: 168 - DNA, 22 bp, synthetic construct
  misc_feature 1..22: note = Synthetic
  source 1..22: mol_type = other DNA
agttagaagatctgagctctga

SEQ ID NO: 169 - DNA, 22 bp, synthetic construct
  misc_feature 1..22: note = Synthetic
  source 1..22: mol_type = other DNA
atgtgtatgcttttctgttaaa

SEQ ID NO: 170 - DNA, 22 bp, synthetic construct
  misc_feature 1..22: note = Synthetic
  source 1..22: mol_type = other DNA
tgatcatctcgttgatatcctc

SEQ ID NO: 171 - DNA, 22 bp, synthetic construct
  misc_feature 1..22: note = Synthetic
  source 1..22: mol_type = other DNA
ttgatcaagcagagaaagccag

SEQ ID NO: 172 - DNA, 22 bp, synthetic construct
  misc_feature 1..22: note = Synthetic
  source 1..22: mol_type = other DNA
agtcggtaagttctgtccaagc

SEQ ID NO: 173 - DNA, 22 bp, synthetic construct
  misc_feature 1..22: note = Synthetic
  source 1..22: mol_type = other DNA
gcccggttgaaatctgccagag

SEQ ID NO: 174 - DNA, 22 bp, synthetic construct
  misc_feature 1..22: note = Synthetic
  source 1..22: mol_type = other DNA
cagagcaggtacctccaacatc

SEQ ID NO: 175 - DNA, 22 bp, synthetic construct
  misc_feature 1..22: note = Synthetic
  source 1..22: mol_type = other DNA
ggtacctccaacatcaaggaag

SEQ ID NO: 176 - DNA, 22 bp, synthetic construct
  misc_feature 1..22: note = Synthetic
  source 1..22: mol_type = other DNA
caaggaagatggcatttctagt

SEQ ID NO: 177 - DNA, 22 bp, synthetic construct
  misc_feature 1..22: note = Synthetic
  source 1..22: mol_type = other DNA
agatggcatttctagtttggag

SEQ ID NO: 178 - DNA, 22 bp, synthetic construct
  misc_feature 1..22: note = Synthetic
  source 1..22: mol_type = other DNA
atggcagtttccttagtaacca

SEQ ID NO: 179 - DNA, 22 bp, synthetic construct
  misc_feature 1..22: note = Synthetic
  source 1..22: mol_type = other DNA
gtcaccagagtaacagtctgag

SEQ ID NO: 180 - DNA, 22 bp, synthetic construct
  misc_feature 1..22: note = Synthetic
  source 1..22: mol_type = other DNA
tctgagtaggagctaaaatatt

SEQ ID NO: 181 - DNA, 22 bp, synthetic construct
  misc_feature 1..22: note = Synthetic
  source 1..22: mol_type = other DNA
ctgagtaggagctaaaatattt

SEQ ID NO: 182 - DNA, 22 bp, synthetic construct
  misc_feature 1..22: note = Synthetic
  source 1..22: mol_type = other DNA
aaatattttgggtttttgcaaa

SEQ ID NO: 183 - DNA, 22 bp, synthetic construct
  misc_feature 1..22: note = Synthetic
  source 1..22: mol_type = other DNA
gtatgagaaaaaatgataaaag

SEQ ID NO: 184 - DNA, 22 bp, synthetic construct
  misc_feature 1..22: note = Synthetic
  source 1..22: mol_type = other DNA
caacgagatgatcatcaagcag

SEQ ID NO: 185 - DNA, 22 bp, synthetic construct
  misc_feature 1..22: note = Synthetic
  source 1..22: mol_type = other DNA
gagggtgatggtgggtgacctt

SEQ ID NO: 186 - DNA, 22 bp, synthetic construct
  misc_feature 1..22: note = Synthetic
  source 1..22: mol_type = other DNA
ataaaatcacagagggtgatgg

SEQ ID NO: 187 - DNA, 22 bp, synthetic construct
  misc_feature 1..22: note = Synthetic
  source 1..22: mol_type = other DNA
tataaaatcacagagggtgatg

SEQ ID NO: 188 - DNA, 22 bp, synthetic construct
  misc_feature 1..22: note = Synthetic
  source 1..22: mol_type = other DNA
agttataaaatcacagagggtg

SEQ ID NO: 189 - DNA, 22 bp, synthetic construct
  misc_feature 1..22: note = Synthetic
  source 1..22: mol_type = other DNA
tgatcaagttataaaatcacag

SEQ ID NO: 190 - DNA, 22 bp, synthetic construct
  misc_feature 1..22: note = Synthetic
  source 1..22: mol_type = other DNA
ttgatcaagttataaaatcaca

SEQ ID NO: 191 - DNA, 22 bp, synthetic construct
  misc_feature 1..22: note = Synthetic
  source 1..22: mol_type = other DNA
gggcttggacagaacttaccga

SEQ ID NO: 192 - DNA, 22 bp, synthetic construct
  misc_feature 1..22: note = Synthetic
  source 1..22: mol_type = other DNA
ctctggcagatttcaaccgggc

SEQ ID NO: 193 - DNA, 22 bp, synthetic construct
  misc_feature 1..22: note = Synthetic
  source 1..22: mol_type = other DNA
acctgctctggcagatttcaac

SEQ ID NO: 194 - DNA, 22 bp, synthetic construct
  misc_feature 1..22: note = Synthetic
  source 1..22: mol_type = other DNA
tacctgctctggcagatttcaa

SEQ ID NO: 195 - DNA, 22 bp, synthetic construct
  misc_feature 1..22: note = Synthetic
  source 1..22: mol_type = other DNA
cttgatgttggaggtacctgct

SEQ ID NO: 196 - DNA, 22 bp, synthetic construct
  misc_feature 1..22: note = Synthetic
  source 1..22: mol_type = other DNA
aatgccatcttccttgatgttg

SEQ ID NO: 197 - DNA, 22 bp, synthetic construct
  misc_feature 1..22: note = Synthetic
  source 1..22: mol_type = other DNA
agaaatgccatcttccttgatg

SEQ ID NO: 198 - DNA, 22 bp, synthetic construct
  misc_feature 1..22: note = Synthetic
  source 1..22: mol_type = other DNA
ggtgacacaacctgtggttact

SEQ ID NO: 199 - DNA, 22 bp, synthetic construct
  misc_feature 1..22: note = Synthetic
  source 1..22: mol_type = other DNA
tgttactctggtgacacaacct

SEQ ID NO: 200 - DNA, 22 bp, synthetic construct
  misc_feature 1..22: note = Synthetic
  source 1..22: mol_type = other DNA
agctcctactcagactgttact

SEQ ID NO: 201 - DNA, 22 bp, synthetic construct
  misc_feature 1..22: note = Synthetic
  source 1..22: mol_type = other DNA
aaaggtatctttgatactaacc

SEQ ID NO: 202 - DNA, 22 bp, synthetic construct
  misc_feature 1..22: note = Synthetic
  source 1..22: mol_type = other DNA
ccttggtttctgtgattttctt

SEQ ID NO: 203 - DNA, 22 bp, synthetic construct
  misc_feature 1..22: note = Synthetic
  source 1..22: mol_type = other DNA
cttttggattgcatctactgta

SEQ ID NO: 204 - DNA, 22 bp, synthetic construct
  misc_feature 1..22: note = Synthetic
  source 1..22: mol_type = other DNA
ttttggattgcatctactgtat

SEQ ID NO: 205 - DNA, 22 bp, synthetic construct
  misc_feature 1..22: note = Synthetic
  source 1..22: mol_type = other DNA
accctccttccatgactcaagc

SEQ ID NO: 206 - DNA, 22 bp, synthetic construct
  misc_feature 1..22: note = Synthetic
  source 1..22: mol_type = other DNA
cttccatgactcaagcttggct

SEQ ID NO: 207 - DNA, 22 bp, synthetic construct
  misc_feature 1..22: note = Synthetic
  source 1..22: mol_type = other DNA
acatttcattcaactgttgcct

SEQ ID NO: 208 - DNA, 22 bp, synthetic construct
  misc_feature 1..22: note = Synthetic
  source 1..22: mol_type = other DNA
tcaactgttgcctccggttctg

SEQ ID NO: 209 - DNA, 22 bp, synthetic construct
  misc_feature 1..22: note = Synthetic
  source 1..22: mol_type = other DNA
tgaattctttcaactagaataa

SEQ ID NO: 210 - DNA, 22 bp, synthetic construct
  misc_feature 1..22: note = Synthetic
  source 1..22: mol_type = other DNA
ccaaaagaaaatcacagaaacc

SEQ ID NO: 211 - DNA, 22 bp, synthetic construct
  misc_feature 1..22: note = Synthetic
  source 1..22: mol_type = other DNA
gccaagcttgagtcatggaagg

SEQ ID NO: 212 - DNA, 22 bp, synthetic construct
  misc_feature 1..22: note = Synthetic
  source 1..22: mol_type = other DNA
agccaagcttgagtcatggaag

SEQ ID NO: 213 - DNA, 22 bp, synthetic construct
  misc_feature 1..22: note = Synthetic
  source 1..22: mol_type = other DNA
cagagccaagcttgagtcatgg

SEQ ID NO: 214 - DNA, 22 bp, synthetic construct
  misc_feature 1..22: note = Synthetic
  source 1..22: mol_type = other DNA
aggccagagccaagcttgagtc

SEQ ID NO: 215 - DNA, 22 bp, synthetic construct
  misc_feature 1..22: note = Synthetic
  source 1..22: mol_type = other DNA
agaagctgagcaggtcttagga

SEQ ID NO: 216 - DNA, 22 bp, synthetic construct
  misc_feature 1..22: note = Synthetic
  source 1..22: mol_type = other DNA
aaggaagaagctgagcaggtct

SEQ ID NO: 217 - DNA, 22 bp, synthetic construct
  misc_feature 1..22: note = Synthetic
  source 1..22: mol_type = other DNA
ggaagctaaggaagaagctgag

SEQ ID NO: 218 - DNA, 22 bp, synthetic construct
  misc_feature 1..22: note = Synthetic
  source 1..22: mol_type = other DNA
ttcaacacaatggctggaagct

SEQ ID NO: 219 - DNA, 22 bp, synthetic construct
  misc_feature 1..22: note = Synthetic
  source 1..22: mol_type = other DNA
gttaaaggattcaacacaatgg

SEQ ID NO: 220 - DNA, 22 bp, synthetic construct
  misc_feature 1..22: note = Synthetic
  source 1..22: mol_type = other DNA
aaatgttaaaggattcaacaca

SEQ ID NO: 221 - DNA, 22 bp, synthetic construct
  misc_feature 1..22: note = Synthetic
  source 1..22: mol_type = other DNA
gcaacagttgaatgaaatgtta

SEQ ID NO: 222 - DNA, 22 bp, synthetic construct
  misc_feature 1..22: note = Synthetic
  source 1..22: mol_type = other DNA
tacaagaacaccttcagaaccg

SEQ ID NO: 223 - DNA, 22 bp, synthetic construct
  misc_feature 1..22: note = Synthetic
  source 1..22: mol_type = other DNA
aagtacaagaacaccttcagaa

SEQ ID NO: 224 - DNA, 22 bp, synthetic construct
  misc_feature 1..22: note = Synthetic
  source 1..22: mol_type = other DNA
agttgaaagaattcagaatcag

SEQ ID NO: 225 - DNA, 22 bp, synthetic construct
  misc_feature 1..22: note = Synthetic
  source 1..22: mol_type = other DNA
tagttgaaagaattcagaatca

SEQ ID NO: 226-299 - skipped (74 entries)

SEQ ID NO: 300 - DNA, 4777 bp, synthetic construct
  misc_feature 1..4777: note = Synthetic
  source 1..4777: mol_type = other DNA
gtttccggccgccgtcgctgtccagggaggctgaggcgagaggtagctgtccgggtggggagcccgcactaccttcttcctcttcctcctcctcctccgggtgaggggagcgaaggttgggggtccccgagcccatggaccaggaggaggcggaggccgccgagagccggggccccgctatgtggccctgagccccgtgtactggttctgcctgtctggagggccatggagaagaggctgggagtcaagccaaatcctgcttcctggattttatcaggatattattggcagacatctgcgaagtggttgagaagcctgtacctgttttatacttgcttttgcttcagcgttctgtggttgtcaacagatgccagtgagagcaggtgccagcaggggaagacacaatttggagttggcctgagatctgggggagaaaatcacctctggcttcttgaaggaaccccctctctccagtcatgttgggctgcctgctgccaggactctgcctgccatgtcttttggtggctagaagggatgtgcattcaggcagactgcagcaggccccagagctgccgggcttttaggacacactcctccaattccatgctggtgtttttaaaaaaattccaaactgcagatgatttgggctttctacctgaagatgatgtaccacatcttctggggctaggttggaactgggcatcttggaggcagagcccacccagagctgcactcagacctgctgtatcttccagtgaccagcagagcttaatcaggaagcttcagaagagaggtagtcccagtgacgtagttacacctatagtgacacagcattctaaagtgaatgactccaacgaattaggtggtctgactaccagtggctctgcagaggtccacaaggcgattacaatttccagtcccctaaccacagacctgactgcagagctgtctggtgggccaaagaatgtatcagtgcaacctgaaatatcagagggtcttgctactacgcccagcactcaacaagtaaaaagttctgagaaaacccagattgctgtcccccagccagtggctccctcctacagttatgctacccctaccccccaggcctctttccagagcacctcagcaccatacccagttataaaggaactggtggtatctgctggagagagtgtccagataaccctgcctaagaatgaagttcaattaaatgcatatgttctccaagaaccacctaaaggagaaacctacacctacgactggcagctgattactcatcctagagactacagtggagaaatggaagggaaacattcccagatcctcaaactatcgaagctcactccaggcctgtatgaattcaaagtgattgtagagggtcaaaatgcccatggggaaggctatgtgaacgtgacagtcaagccagagccccgtaagaatcggccccccattgctattgtgtcacctcagttccaggagatctctttgccaaccacttctacagtcattgatggcagtcaaagcactgatgatgataaaatcgttcagtaccattgggaagaacttaaggggcctctaagagaagagaagatttctgaagatacagccatattaaaactaagtaaactcgtccctgggaactacactttcagcttgactgtagtagactctgatggagctaccaactctactactgcaaacctgacagtgaacaaagctgtggattacccccctgtggccaacgcaggccccaaccaagtgatcaccctgccccaaaactccatcaccctctttgggaaccagagcactgatgatcatggcatcaccagctatgagtggtcactcagcccaagcagcaaagggaaagtggtggagatgcagggtgttagaacaccaaccttacagctctctgcgatgcaagaaggagactacacttaccagctcacagtgactgacacaataggacagcaggccactgctcaagtgactgttattgtgcaacctgaaaacaataagcctcctcaggcagatgcaggcccagataaagagctgacccttcctgtggatagcacaaccctggatggcagcaagagctcagatgatcagaaaattatctcatatctctgggaaaaaacacagggacctgatggggtgcagctcgagaatgctaacagcagtgttgctactgtgactgggctgcaagtggggacctatgtgttcaccttgactgtcaaagatgagaggaacctgcaaagccagagctctgtgaatgtcattgtcaaagaagaaataaacaaaccacctatagccaagataactgggaatgtggtgattaccctacccacgagcacagcagagctggatggctctaagtcctcagatgacaagggaatagtcagctacctctggactcgagatgaggggagcccagcagcaggggaggtgttaaatcactctgaccatcaccctatcctttttctttcaaacctggttgagggaacctacacttttcacctgaaagtgaccgatgcaaagggtgagagtgacacagaccggaccactgtggaggtgaaacctgatcccaggaaaaacaacctggtggagatcatcttggatatcaacgtcagtcagctaactgagaggctgaaggggatgttcatccgccagattggggtcctcctgggggtgctggattccgacatcattgtgcaaaagattcagccgtacacggagcagagcaccaaaatggtattttttgttcaaaacgagcctccccaccagatcttcaaaggccatgaggtggcagcgatgctcaagagtgagctgcggaagcaaaaggcagactttttgatattcagagccttggaagtcaacactgtcacatgtcagctgaactgttccgaccatggccactgtgactcgttcaccaaacgctgtatctgtgaccctttttggatggagaatttcatcaaggtgcagctgagggatggagacagcaactgtgagtggagcgtgttatatgttatcattgctacctttgtcattgttgttgccttgggaatcctgtcttggactgtgatctgttgttgtaagaggcaaaaaggaaaacccaagaggaaaagcaagtacaagatcctggatgccacggatcaggaaagcctggagctgaagccaacctcccgagcaggcatcaaacagaaaggccttttgctaagtagcagcctgatgcactccgagtcagagctggacagcgatgatgccatctttacatggccagaccgagagaagggcaaactcctgcatggtcagaatggctctgtacccaacgggcagacccctctgaaggccaggagcccgcgggaggagatcctgtagccacctggtctgtctcctcagggcagggcccagcacactgcccggccagtcctcctacctcccgagtctgcgggcagctgctgtcccagcatctgctggtcatttcgccctgacagtcccaaccagaacccctgggacttgaatccagagacgtcctccaggaacccctcaacgaagctgtgaatgaagaggtttcctctttaaacctgtctggtgggcccccagatatcctcacctcagggcctcctttttttgcaaactcctcccctcccccgagggcagacccagccagctgctaagctctgcagctccccagtggacagtgtcattgtgcccagagtgctgcaaggtgaggcctgctgtgctgcccgcacacctgagtgcaaaaccaagcactgtgggcatggtgtttccctctctggggtagagtacgccctctcgctgggcaaagaggaagtggcacccctcccctcaccacagatgctgagatggtagcatagaaatgatggccgggcgcggtggctcacgcctgtaatcccagcactttgggaggccgaggcgggcggatcatgaggtcaggagatcaagaccaccctggctaacacggtgaaaccccatctctactaaaaataaaaaaaaaaattagccgggtttggtggcgtatgcctgtaatcccagctactcgggaggctgaggcaggagaattgcttaaacctgggaggtggaggctgcagtgagccaagatcgtgccactgcactccagcctgagtgacagagcaagactccgtcaaaaaaaaaaaaaaaaaaaaagaaatgatatctggcccccccttaacactggagccccactcccttctcccatccggcccgagattagggaggattgactgtgtcagggatggcgggtggcctctctcgctgccagggcccttgtcagagcagccaggctggacagacggcctccctcctctccatctgaccggcacctgctgcttcggggcttaggccaccgctccctgtccccagaggagatagccccagatggactggaatgttgtggcatgagagcgcatgtgtgcgatggccccgctgtggtcccctctctgtccctccatctgtatgtgttctgtgtcccttgcatgtgtgcgtgttagagtgagcgcgtatgcatcaactcattgggctcttggctgctcacaaggcaaatttgacttggaaagactttcatctccttggaaccaagacttcctgagtccccctcaccctggccctgttccaccatggttatctgggtattggggaatggaaactttgggggagtgactttttaaagagacacttataatttctactactgcactactgtccattgtgggatgattaaacatggtatttaactgtg

SEQ ID NO: 301 - protein, 1049 aa, synthetic construct
  REGION 1..1049: note = Synthetic
MEKRLGVKPNPASWILSGYYWQTSAKWLRSLYLFYTCFCFSVLWLSTDASESRCQQGKTQFGVGLRSGGENHLWLLEGTPSLQSCWAACCQDSACHVFWWLEGMCIQADCSRPQSCRAFRTHSSNSMLVFLKKFQTADDLGFLPEDDVPHLLGLGWNWASWRQSPPRAALRPAVSSSDQQSLIRKLQKRGSPSDVVTPIVTQHSKVNDSNELGGLTTSGSAEVHKAITISSPLTTDLTAELSGGPKNVSVQPEISEGLATTPSTQQVKSSEKTQIAVPQPVAPSYSYATPTPQASFQSTSAPYPVIKELVVSAGESVQITLPKNEVQLNAYVLQEPPKGETYTYDWQLITHPRDYSGEMEGKHSQILKLSKLTPGLYEFKVIVEGQNAHGEGYVNVTVKPEPRKNRPPIAIVSPQFQEISLPTTSTVIDGSQSTDDDKIVQYHWEELKGPLREEKISEDTAILKLSKLVPGNYTFSLTVVDSDGATNSTTANLTVNKAVDYPPVANAGPNQVITLPQNSITLFGNQSTDDHGITSYEWSLSPSSKGKVVEMQGVRTPTLQLSAMQEGDYTYQLTVTDTIGQQATAQVTVIVQPENNKPPQADAGPDKELTLPVDSTTLDGSKSSDDQKIISYLWEKTQGPDGVQLENANSSVATVTGLQVGTYVFTLTVKDERNLQSQSSVNVIVKEEINKPPIAKITGNVVITLPTSTAELDGSKSSDDKGIVSYLWTRDEGSPAAGEVLNHSDHHPILFLSNLVEGTYTFHLKVTDAKGESDTDRTTVEVKPDPRKNNLVEIILDINVSQLTERLKGMFIRQIGVLLGVLDSDIIVQKIQPYTEQSTKMVFFVQNEPPHQIFKGHEVAAMLKSELRKQKADFLIFRALEVNTVTCQLNCSDHGHCDSFTKRCICDPFWMENFIKVQLRDGDSNCEWSVLYVIIATFVIVVALGILSWTVICCCKRQKGKPKRKSKYKILDATDQESLELKPTSRAGIKQKGLLLSSSLMHSESELDSDDAIFTWPDREKGKLLHGQNGSVPNGQTPLKARSPREEIL

SEQ ID NO: 302 - DNA, 436 bp, synthetic construct
  misc_feature 1..436: note = Synthetic
  source 1..436: mol_type = other DNA
tgcccatgtaaggaggcaaggcctggggacacccgagatgcctggttataattaacccagacatgtggctgcccccccccccccaacacctgctgcctctaaaaataaccctgcatgccatgttcccggcgaagggccagctgtcccccgccagctagactcagcacttagtttaggaaccagtgagcaagtcagcccttggggcagcccatacaaggccatggggctgggcaagctgcacgcctgggtccggggtgggcacggtgcccgggcaacgagctgaaagctcatctgctctcaggggcccctccctggggacagcccctcctggctagtcacaccctgtaggctcctctatataacccaggggcacaggggctgccctcattctaccaccacctccacagcacagacagacactcaggagccagccagc

SEQ ID NO: 303 - DNA, 249 bp, synthetic construct
  misc_feature 1..249: note = Synthetic
  source 1..249: mol_type = other DNA
gagggcctatttcccatgattccttcatatttgcatatacgatacaaggctgttagagagataattggaattaatttgactgtaaacacaaagatattagtacaaaatacgtgacgtagaaagtaataatttcttgggtagtttgcagttttaaaattatgttttaaaatggactatcatatgcttaccgtaacttgaaagtatttcgatttcttggctttatatatcttgtggaaaggacgaaacacc

SEQ ID NO: 304 - DNA, 108 bp, synthetic construct
  misc_feature 1..108: note = Synthetic
  source 1..108: mol_type = other DNA
gctcggcgcgcccatatttgcatgtcgctatgtgttctgggaaatcaccataaacgtgaaatgtctttggatttgggaatcttataagttctgtatgagaccacggta

SEQ ID NO: 305 - DNA, 243 bp, synthetic construct
  misc_feature 1..243: note = Synthetic
  source 1..243: mol_type = other DNA
ctgcagtatttagcatgccccacccatctgcaaggcattctggatagtgtcaaaacagccggaaatcaagtccgtttatctcaaactttagcattttgggaataaatgatatttgctatgctggttaaattagattttagttaaatttcctgctgaagctctagtacgataagcaacttgacctaagtgtaaagttgagacttccttcaggtttatatagcttgtgcgccgcttgggtacctc

SEQ ID NO: 306 - protein, 1052 aa, synthetic construct
  REGION 1..1052: note = Synthetic
KRNYILGLDIGITSVGYGIIDYETRDVIDAGVRLFKEANVENNEGRRSKRGARRLKRRRRHRIQRVKKLLFDYNLLTDHSELSGINPYEARVKGLSQKLSEEEFSAALLHLAKRRGVHNVNEVEEDTGNELSTKEQISRNSKALEEKYVAELQLERLKKDGEVRGSINRFKTSDYVKEAKQLLKVQKAYHQLDQSFIDTYIDLLETRRTYYEGPGEGSPFGWKDIKEWYEMLMGHCTYFPEELRSVKYAYNADLYNALNDLNNLVITRDENEKLEYYEKFQIIENVFKQKKKPTLKQIAKEILVNEEDIKGYRVTSTGKPEFTNLKVYHDIKDITARKEIIENAELLDQIAKILTIYQSSEDIQEELTNLNSELTQEEIEQISNLKGYTGTHNLSLKAINLILDELWHTNDNQIAIFNRLKLVPKKVDLSQQKEIPTTLVDDFILSPVVKRSFIQSIKVINAIIKKYGLPNDIIIELAREKNSKDAQKMINEMQKRNRQTNERIEEIIRTTGKENAKYLIEKIKLHDMQEGKCLYSLEAIPLEDLLNNPFNYEVDHIIPRSVSFDNSFNNKVLVKQEENSKKGNRTPFQYLSSSDSKISYETFKKHILNLAKGKGRISKTKKEYLLEERDINRFSVQKDFINRNLVDTRYATRGLMNLLRSYFRVNNLDVKVKSINGGFTSFLRRKWKFKKERNKGYKHHAEDALIIANADFIFKEWKKLDKAKKVMENQMFEEKQAESMPEIETEQEYKEIFITPHQIKHIKDFKDYKYSHRVDKKPNRELINDTLYSTRKDDKGNTLIVNNLNGLYDKDNDKLKKLINKSPEKLLMYHHDPQTYQKLKLIMEQYGDEKNPLYKYYEETGNYLTKYSKKDNGPVIKKIKYYGNKLNAHLDITDDYPNSRNKVVKLSLKPYRFDVYLDNGVYKFVTVKNLDVIKKENYYEVNSKCYEEAKKLKKISNQAEFIASFYNNDLIKINGELYRVIGVNNDLLNRIEVNMIDITYREYLENMNDKRPPRIIKTIASKTQSIKKYSTDILGNLYEVKSKKHPQIIKKG

SEQ ID NO: 307 - protein, 1052 aa, synthetic construct
  REGION 1..1052: note = Synthetic
KRNYILGLDIGITSVGYGIIDYETRDVIDAGVRLFKEANVENNEGRRSKRGARRLKRRRRHRIQRVKKLLFDYNLLTDHSELSGINPYEARVKGLSQKLSEEEFSAALLHLAKRRGVHNVNEVEEDTGNELSTKEQISRNSKALEEKYVAELQLERLKKDGEVRGSINRFKTSDYVKEAKQLLKVQKAYHQLDQSFIDTYIDLLETRRTYYEGPGEGSPFGWKDIKEWYEMLMGHCTYFPEELRSVKYAYNADLYNALNDLNNLVITRDENEKLEYYEKFQIIENVFKQKKKPTLKQIAKEILVNEEDIKGYRVTSTGKPEFTNLKVYHDIKDITARKEIIENAELLDQIAKILTIYQSSEDIQEELTNLNSELTQEEIEQISNLKGYTGTHNLSLKAINLILDELWHTNDNQIAIFNRLKLVPKKVDLSQQKEIPTTLVDDFILSPVVKRSFIQSIKVINAIIKKYGLPNDIIIELAREKNSKDAQKMINEMQKRNRQTNERIEEIIRTTGKENAKYLIEKIKLHDMQEGKCLYSLEAIPLEDLLNNPFNYEVDHIIPRSVSFDNSFNNKVLVKQEENSKKGNRTPFQYLSSSDSKISYETFKKHILNLAKGKGRISKTKKEYLLEERDINRFSVQKDFINRNLVDTRYATRGLMNLLRSYFRVNNLDVKVKSINGGFTSFLRRKWKFKKERNKGYKHHAEDALIIANADFIFKEWKKLDKAKKVMENQMFEEKQAESMPEIETEQEYKEIFITPHQIKHIKDFKDYKYSHRVDKKPNRKLINDTLYSTRKDDKGNTLIVNNLNGLYDKDNDKLKKLINKSPEKLLMYHHDPQTYQKLKLIMEQYGDEKNPLYKYYEETGNYLTKYSKKDNGPVIKKIKYYGNKLNAHLDITDDYPNSRNKVVKLSLKPYRFDVYLDNGVYKFVTVKNLDVIKKENYYEVNSKCYEEAKKLKKISNQAEFIASFYKNDLIKINGELYRVIGVNNDLLNRIEVNMIDITYREYLENMNDKRPPHIIKTIASKTQSIKKYSTDILGNLYEVKSKKHPQIIKKG

SEQ ID NO: 308 - protein, 1053 aa, synthetic construct
  REGION 1..1053: note = Synthetic
NQKFILGLDIGITSVGYGLIDYETKNIIDAGVRLFPEANVENNEGRRSKRGSRRLKRRRIHRLERVKKLLEDYNLLDQSQIPQSTNPYAIRVKGLSEALSKDELVIALLHIAKRRGIHKIDVIDSNDDVGNELSTKEQLNKNSKLLKDKFVCQIQLERMNEGQVRGEKNRFKTADIIKEIIQLLNVQKNFHQLDENFINKYIELVEMRREYFEGPGKGSPYGWEGDPKAWYETLMGHCTYFPDELRSVKYAYSADLFNALNDLNNLVIQRDGLSKLEYHEKYHIIENVFKQKKKPTLKQIANEINVNPEDIKGYRITKSGKPQFTEFKLYHDLKSVLFDQSILENEDVLDQIAEILTIYQDKDSIKSKLTELDILLNEEDKENIAQLTGYTGTHRLSLKCIRLVLEEQWYSSRNQMEIFTHLNIKPKKINLTAANKIPKAMIDEFILSPVVKRTFGQAINLINKIIEKYGVPEDIIIELARENNSKDKQKFINEMQKKNENTRKRINEIIGKYGNQNAKRLVEKIRLHDEQEGKCLYSLESIPLEDLLNNPNHYEVDHIIPRSVSFDNSYHNKVLVKQSENSKKSNLTPYQYFNSGKSKLSYNQFKQHILNLSKSQDRISKKKKEYLLEERDINKFEVQKEFINRNLVDTRYATRELTNYLKAYFSANNMNVKVKTINGSFTDYLRKVWKFKKERNHGYKHHAEDALIIANADFLFKENKKLKAVNSVLEKPEIETKQLDIQVDSEDNYSEMFIIPKQVQDIKDFRNFKYSHRVDKKPNRQLINDTLYSTRKKDNSTYIVQTIKDIYAKDNTTLKKQFDKSPEKFLMYQHDPRTFEKLEVIMKQYANEKNPLAKYHEETGEYLTKYSKKNNGPIVKSLKYIGNKLGSHLDVTHQFKSSTKKLVKLSIKPYRFDVYLTDKGYKFITISYLDVLKKDNYYYIPEQKYDKLKLGKAIDKNAKFIASFYKNDLIKLDGEIYKIIGVNSDTRNMIELDLPDIRYKEYCELNNIKGEPRIKKTIGKKVNSIEKLTTDVLGNVFTNTQYTKPQLLFKRGN

SEQ ID NO: 309 - protein, 1057 aa, synthetic construct
  REGION 1..1057: note = Synthetic
MNQKFILGLDIGITSVGYGLIDYETKNIIDAGVRLFPEANVENNEGRRSKRGSRRLKRRRIHRLDRVKHLLAEYDLLDLTNIPKSTNPYQTRVKGLNEKLSKDELVIALLHIAKRRGIHNVDVAADKEETASDSLSTKDQINKNAKFLESRYVCELQKERLENEGHVRGVENRFLTKDIVREAKKIIDTQMQYYPEIDETFKEKYISLVETRREYFEGPGKGSPFGWEGNIKKWFEQMMGHCTYFPEELRSVKYSYSAELFNALNDLNNLVITRDEDAKLNYGEKFQIIENVFKQKKTPNLKQIAIEIGVHETEIKGYRVNKSGTPEFTEFKLYHDLKSIVFDKSILENEAILDQIAEILTIYQDEQSIKEELNKLPEILNEQDKAEIAKLIGYNGTHRLSLKCIHLINEELWQTSRNQMEIFNYLNIKPNKVDLSEQNKIPKDMVNDFILSPVVKRTFIQSINVINKVIEKYGIPEDIIIELARENNSDDRKKFINNLQKKNEATRKRINEIIGQTGNQNAKRIVEKIRLHDQQEGKCLYSLKDIPLEDLLRNPNNYDIDHIIPRSVSFDDSMHNKVLVRREQNAKKNNQTPYQYLTSGYADIKYSVFKQHVLNLAENKDRMTKKKREYLLEERDINKFEVQKEFINRNLVDTRYATRELTNYLKAYFSANNMNVKVKTINGSFTDYLRKVWKFKKERNHGYKHHAEDALIIANADFLFKENKKLKAVNSVLEKPEIETKQLDIQVDSEDNYSEMFIIPKQVQDIKDFRNFKYSHRVDKKPNRQLINDTLYSTRKKDNSTYIVQTIKDIYAKDNTTLKKQFDKSPEKFLMYQHDPRTFEKLEVIMKQYANEKNPLAKYHEETGEYLTKYSKKNNGPIVKSLKYIGNKLGSHLDVTHQFKSSTKKLVKLSIKPYRFDVYLTDKGYKFITISYLDVLKKDNYYYIPEQKYDKLKLGKAIDKNAKFIASFYKNDLIKLDGEIYKIIGVNSDTRNMIELDLPDIRYKEYCELNNIKGEPRIKKTIGKKVNSIEKLTTDVLGNVFTNTQYTKPQLLFKRGN

SEQ ID NO: 310 - protein, 1053 aa, synthetic construct
  REGION 1..1053: note = Synthetic
MNQKFILGLDIGITSVGYGLIDYETKNIIDAGVRLFPEANVENNEGRRSKRGSRRLKRRRIHRLERVKSLLSEYKIISGLAPTNNQPYNIRVKGLTEQLTKDELAVALLHIAKRRGIHKIDVIDSNDDVGNELSTKEQLNKNSKLLKDKFVCQIQLERMNEGQVRGEKNRFKTADIIKEIIQLLNVQKNFHQLDENFINKYIELVEMRREYFEGPGQGSPFGWNGDLKKWYEMLMGHCTYFPQELRSVKYAYSADLFNALNDLNNLIIQRDNSEKLEYHEKYHIIENVFKQKKKPTLKQIAKEIGVNPEDIKGYRITKSGTPEFTEFKLYHDLKSVLFDQSILENEDVLDQIAEILTIYQDKDSIKSKLTELDILLNEEDKENIAQLTGYNGTHRLSLKCIRLVLEEQWYSSRNQMEIFTHLNIKPKKINLTAANKIPKAMIDEFILSPVVKRTFIQSINVINKVIEKYGIPEDIIIELARENNSDDRKKFINNLQKKNEATRKRINEIIGQTGNQNAKRIVEKIRLHDQQEGKCLYSLESIALMDLLNNPQNYEVDHIIPRSVAFDNSIHNKVLVKQIENSKKGNRTPYQYLNSSDAKLSYNQFKQHILNLSKSKDRISKKKKDYLLEERDINKFEVQKEFINRNLVDTRYATRELTSYLKAYFSANNMDVKVKTINGSFTNHLRKVWRFDKYRNHGYKHHAEDALIIANADFLFKENKKLKAVNSVLEKPEIETKQLDIQVDSEDNYSEMFIIPKQVQDIKDFRNFKYSHRVDKKPNRQLINDTLYSTRKKDNSTYIVQTIKDIYAKDNTTLKKQFDKSPEKFLMYQHDPRTFEKLEVIMKQYANEKNPLAKYHEETGEYLTKYSKKNNGPIVKSLKYIGNKLGSHLDVTHQFKSSTKKLVKLSIKPYRFDVYLTDKGYKFITISYLDVLKKDNYYYIPEQKYDKLKLGKAIDKNAKFIASFYKNDLIKLDGEIYKIIGVNSDTRNMIELDLPDIRYKEYCELNNIKGEPRIKKTIGKKVNSIEKLTTDVLGNVFTNTQYTKPQLLFKRGN

SEQ ID NO: 311 - protein, 1057 aa, synthetic construct
  REGION 1..1057: note = Synthetic
MNQKFILGLDIGITSVGYGLIDYETKNIIDAGVRLFPEANVENNEGRRSKRGSRRLKRRRIHRLERVKLLLTEYDLINKEQIPTSNNPYQIRVKGLSEILSKDELAIALLHLAKRRGIHNVDVAADKEETASDSLSTKDQINKNAKFLESRYVCELQKERLENEGHVRGVENRFLTKDIVREAKKIIDTQMQYYPEIDETFKEKYISLVETRREYFEGPGQGSPFGWNGDLKKWYEMLMGHCTYFPQELRSVKYAYSADLFNALNDLNNLIIQRDNSEKLEYHEKYHIIENVFKQKKKPTLKQIAKEIGVNPEDIKGYRITKSGTPEFTSFKLFHDLKKVVKDHAILDDIDLLNQIAEILTIYQDKDSIVAELGQLEYLMSEADKQSISELTGYTGTHSLSLKCMNMIIDELWHSSMNQMEVFTYLNMRPKKYELKGYQRIPTDMIDDAILSPVVKRTFIQSINVINKVIEKYGIPEDIIIELARENNSDDRKKFINNLQKKNEATRKRINEIIGQTGNQNAKRIVEKIRLHDQQEGKCLYSLESIPLEDLLNNPNHYEVDHIIPRSVSFDNSYHNKVLVKQSENSKKSNLTPYQYFNSGKSKLSYNQFKQHILNLSKSQDRISKKKKEYLLEERDINKFEVQKEFINRNLVDTRYATRELTNYLKAYFSANNMNVKVKTINGSFTDYLRKVWKFKKERNHGYKHHAEDALIIANADFLFKENKKLKAVNSVLEKPEIETKQLDIQVDSEDNYSEMFIIPKQVQDIKDFRNFKYSHRVDKKPNRQLINDTLYSTRKKDNSTYIVQTIKDIYAKDNTTLKKQFDKSPEKFLMYQHDPRTFEKLEVIMKQYANEKNPLAKYHEETGEYLTKYSKKNNGPIVKSLKYIGNKLGSHLDVTHQFKSSTKKLVKLSIKPYRFDVYLTDKGYKFITISYLDVLKKDNYYYIPEQKYDKLKLGKAIDKNAKFIASFYKNDLIKLDGEIYKIIGVNSDTRNMIELDLPDIRYKEYCELNNIKGEPRIKKTIGKKVNSIEKLTTDVLGNVFTNTQYTKPQLLFKRGN

SEQ ID NO: 312 - protein, 1057 aa, synthetic construct
  REGION 1..1057: note = Synthetic
MNQKFILGLDIGITSVGYGLIDYETKNIIDAGVRLFPEANVENNEGRRSKRGSRRLKRRRIHRLERVKLLLTEYDLINKEQIPTSNNPYQIRVKGLSEILSKDELAIALLHLAKRRGIHNVDVAADKEETASDSLSTKDQINKNAKFLESRYVCELQKERLENEGHVRGVENRFLTKDIVREAKKIIDTQMQYYPEIDETFKEKYISLVETRREYFEGPGQGSPFGWNGDLKKWYEMLMGHCTYFPQELRSVKYAYSADLFNALNDLNNLIIQRDNSEKLEYHEKYHIIENVFKQKKKPTLKQIAKEIGVNPEDIKGYRITKSGTPEFTSFKLFHDLKKVVKDHAILDDIDLLNQIAEILTIYQDKDSIVAELGQLEYLMSEADKQSISELTGYTGTHSLSLKCMNMIIDELWHSSMNQMEVFTYLNMRPKKYELKGYQRIPTDMIDDAILSPVVKRTFIQSINVINKVIEKYGIPEDIIIELARENNSDDRKKFINNLQKKNEATRKRINEIIGQTGNQNAKRIVEKIRLHDQQEGKCLYSLESIPLEDLLNNPNHYEVDHIIPRSVSFDNSYHNKVLVKQSENSKKSNLTPYQYFNSGKSKLSYNQFKQHILNLSKSQDRISKKKKEYLLEERDINKFEVQKEFINRNLVDTRYATRELTNYLKAYFSANNMNVKVKTINGSFTDYLRKVWKFKKERNHGYKHHAEDALIIANADFLFKENKKLKAVNSVLEKPEIETKQLDIQVDSEDNYSEMFIIPKQVQDIKDFRNFKYSHRVDKKPNRQLINDTLYSTRKKDNSTYIVQTIKDIYAKDNTTLKKQFDKSPEKFLMYQHDPRTFEKLEVIMKQYANEKNPLAKYHEETGEYLTKYSKKNNGPIVKSLKYIGNKLGSHLDVTHQFKSSTKKLVKLSIKNYRFDVYLTEKGYKFVTIAYLNVFKKDNYYYIPKDKYQELKEKKKIKDTDQFIASFYKNDLIKLNGDLYKIIGVNSDDRNIIELDYYDIKYKDYCEINNIKGEPRIKKTIGKKTESIEKFTTDVLGNLYLHSTEKAPQLIFKRGL

SEQ ID NO: 313 - protein, 1057 aa, synthetic construct
  REGION 1..1057: note = Synthetic
MNQKFILGLDIGITSVGYGLIDYETKNIIDAGVRLFPEANVENNEGRRSKRGSRRLKRRRIHRLERVKLLLTEYDLINKEQIPTSNNPYQIRVKGLSEILSKDELAIALLHLAKRRGIHNVDVAADKEETASDSLSTKDQINKNAKFLESRYVCELQKERLENEGHVRGVENRFLTKDIVREAKKIIDTQMQYYPEIDETFKEKYISLVETRREYFEGPGQGSPFGWNGDLKKWYEMLMGHCTYFPQELRSVKYAYSADLFNALNDLNNLIIQRDNSEKLEYHEKYHIIENVFKQKKKPTLKQIAKEIGVNPEDIKGYRITKSGTPEFTSFKLFHDLKKVVKDHAILDDIDLLNQIAEILTIYQDKDSIVAELGQLEYLMSEADKQSISELTGYTGTHSLSLKCMNMIIDELWHSSMNQMEVFTYLNMRPKKYELKGYQRIPTDMIDDAILSPVVKRTFIQSINVINKVIEKYGIPEDIIIELARENNSDDRKKFINNLQKKNEATRKRINEIIGQTGNQNAKRIVEKIRLHDQQEGKCLYSLESIPLEDLLNNPNHYEVDHIIPRSVSFDNSYHNKVLVKQSENSKKSNLTPYQYFNSGKSKLSYNQFKQHILNLSKSQDRISKKKKEYLLEERDINKFEVQKEFINRNLVDTRYATRELTNYLKAYFSANNMNVKVKTINGSFTDYLRKVWKFKKERNHGYKHHAEDALIIANADFLFKENKKLKAVNSVLEKPEIETKQLDIQVDSEDNYSEMFIIPKQVQDIKDFRNFKFSHRVDKKPNRQLINDTLYSTRMKDEHDYIVQTITDIYGKDNTNLKKQFNKNPEKFLMYQNDPKTFEKLSIIMKQYSDEKNPLAKYYEETGEYLTKYSKKNNGPIVKKIKLLGNKVGNHLDVTNKYENSTKKLVKLSIKNYRFDVYLTEKGYKFVTIAYLNVFKKDNYYYIPKDKYQELKEKKKIKDTDQFIASFYKNDLIKLNGDLYKIIGVNSDDRNIIELDYYDIKYKDYCEINNIKGEPRIKKTIGKKTESIEKFTTDVLGNLYLHSTEKAPQLIFKRGL

SEQ ID NO: 314 - protein, 1057 aa, synthetic construct
  REGION 1..1057: note = Synthetic
MNQKFILGLDIGITSVGYGLIDYETKNIIDAGVRLFPEANVENNEGRRSKRGSRRLKRRRIHRLERVKLLLTEYDLINKEQIPTSNNPYQIRVKGLSEILSKDELAIALLHLAKRRGIHNVDVAADKEETASDSLSTKDQINKNAKFLESRYVCELQKERLENEGHVRGVENRFLTKDIVREAKKIIDTQMQYYPEIDETFKEKYISLVETRREYFEGPGQGSPFGWNGDLKKWYEMLMGHCTYFPQELRSVKYAYSADLFNALNDLNNLIIQRDNSEKLEYHEKYHIIENVFKQKKKPTLKQIAKEIGVNPEDIKGYRITKSGTPEFTSFKLFHDLKKVVKDHAILDDIDLLNQIAEILTIYQDKDSIVAELGQLEYLMSEADKQSISELTGYTGTHSLSLKCMNMIIDELWHSSMNQMEVFTYLNMRPKKYELKGYQRIPTDMIDDAILSPVVKRTFIQSINVINKVIEKYGIPEDIIIELARENNSDDRKKFINNLQKKNEATRKRINEIIGQTGNQNAKRIVEKIRLHDQQEGKCLYSLESIPLEDLLNNPNHYEVDHIIPRSVSFDNSYHNKVLVKQSENSKKSNLTPYQYFNSGKSKLSYNQFKQHILNLSKSQDRISKKKKEYLLEERDINKFEVQKEFINRNLVDTRYATRELTSYLKAYFSANNMDVKVKTINGSFTNHLRKVWRFDKYRNHGYKHHAEDALIIANADFLFKENKKLQNTNKILEKPTIENNTKKVTVEKEEDYNNVFETPKLVEDIKQYRDYKFSHRVDKKPNRQLINDTLYSTRMKDEHDYIVQTITDIYGKDNTNLKKQFNKNPEKFLMYQNDPKTFEKLSIIMKQYSDEKNPLAKYYEETGEYLTKYSKKNNGPIVKKIKLLGNKVGNHLDVTNKYENSTKKLVKLSIKNYRFDVYLTEKGYKFVTIAYLNVFKKDNYYYIPKDKYQELKEKKKIKDTDQFIASFYKNDLIKLNGDLYKIIGVNSDDRNIIELDYYDIKYKDYCEINNIKGEPRIKKTIGKKTESIEKFTTDVLGNLYLHSTEKAPQLIFKRGL

SEQ ID NO: 315 - protein, 1054 aa, synthetic construct
  REGION 1..1054: note = Synthetic
MNQKFILGLDIGITSVGYGLIDYETKNIIDAGVRLFPEANVENNEGRRSKRGSRRLKRRRIHRLERVKKLLEDYNLLDQSQIPQSTNPYAIRVKGLSEALSKDELVIALLHIAKRRGIHNINVSSEDEDASNELSTKEQINRNNKLLKDKYVCEVQLQRLKEGQIRGEKNRFKTTDILKEIDQLLKVQKDYHNLDIDFINQYKEIVETRREYFEGPGKGSPYGWEGDPKAWYETLMGHCTYFPDELRSVKYAYSADLFNALNDLNNLVIQRDGLSKLEYHEKYHIIENVFKQKKKPTLKQIANEINVNPEDIKGYRITKSGKPEFTSFKLFHDLKKVVKDHAILDDIDLLNQIAEILTIYQDKDSIVAELGQLEYLMSEADKQSISELTGYTGTHSLSLKCMNMIIDELWHSSMNQMEVFTYLNMRPKKYELKGYQRIPTDMIDDAILSPVVKRTFIQSINVINKVIEKYGIPEDIIIELARENNSDDRKKFINNLQKKNEATRKRINEIIGQTGNQNAKRIVEKIRLHDQQEGKCLYSLESIPLEDLLNNPNHYEVDHIIPRSVSFDNSYHNKVLVKQSENSKKSNLTPYQYFNSGKSKLSYNQFKQHILNLSKSQDRISKKKKEYLLEERDINKFEVQKEFINRNLVDTRYATRELTNYLKAYFSANNMNVKVKTINGSFTDYLRKVWKFKKERNHGYKHHAEDALIIANADFLFKENKKLKAVNSVLEKPEIETKQLDIQVDSEDNYSEMFIIPKQVQDIKDFRNFKYSHRVDKKPNRQLINDTLYSTRKKDNSTYIVQTIKDIYAKDNTTLKKQFDKSPEKFLMYQHDPRTFEKLEVIMKQYANEKNPLAKYHEETGEYLTKYSKKNNGPIVKSLKYIGNKLGSHLDVTHQFKSSTKKLVKLSIKPYRFDVYLTDKGYKFITISYLDVLKKDNYYYIPEQKYDKLKLGKAIDKNAKFIASFYKNDLIKLDGEIYKIIGVNSDTRNMIELDLPDIRYKEYCELNNIKGEPRIKKTIGKKVNSIEKLTTDVLGNVFTNTQYTKPQLLFKRGN

SEQ ID NO: 316-319 - skipped (4 entries)

SEQ ID NO: 320 - protein, 1368 aa, synthetic construct [sequence omitted]

SEQ ID NO: 321-349 - skipped (29 entries)

SEQ ID NO: 350 - DNA, 5173 bp, synthetic construct
  misc_feature 1..5173: note = Synthetic
  source 1..5173: mol_type = other DNA
gtgcaatcgcgggaagccagggtttccagctaggacacagcaggtcgtgatccgggtcgggacactgcctggcagaggctgcgagcatggggccctggggctggaaattgcgctggaccgtcgccttgctcctcgccgcggcggggactgcagtgggcgacagatgcgaaagaaacgagttccagtgccaagacgggaaatgcatctcctacaagtgggtctgcgatggcagcgctgagtgccaggatggctctgatgagtcccaggagacgtgcttgtctgtcacctgcaaatccggggacttcagctgtgggggccgtgtcaaccgctgcattcctcagttctggaggtgcgatggccaagtggactgcgacaacggctcagacgagcaaggctgtccccccaagacgtgctcccaggacgagtttcgctgccacgatgggaagtgcatctctcggcagttcgtctgtgactcagaccgggactgcttggacggctcagacgaggcctcctgcccggtgctcacctgtggtcccgccagcttccagtgcaacagctccacctgcatcccccagctgtgggcctgcgacaacgaccccgactgcgaagatggctcggatgagtggccgcagcgctgtaggggtctttacgtgttccaaggggacagtagcccctgctcggccttcgagttccactgcctaagtggcgagtgcatccactccagctggcgctgtgatggtggccccgactgcaaggacaaatctgacgaggaaaactgcgctgtggccacctgtcgccctgacgaattccagtgctctgatggaaactgcatccatggcagccggcagtgtgaccgggaatatgactgcaaggacatgagcgatgaagttggctgcgttaatgtgacactctgcgagggacccaacaagttcaagtgtcacagcggcgaatgcatcaccctggacaaagtctgcaacatggctagagactgccgggactggtcagatgaacccatcaaagagtgcgggaccaacgaatgcttggacaacaacggcggctgttcccacgtctgcaatgaccttaagatcggctacgagtgcctgtgccccgacggcttccagctggtggcccagcgaagatgcgaagatatcgatgagtgtcaggatcccgacacctgcagccagctctgcgtgaacctggagggtggctacaagtgccagtgtgaggaaggcttccagctggacccccacacgaaggcctgcaaggctgtgggctccatcgcctacctcttcttcaccaaccggcacgaggtcaggaagatgacgctggaccggagcgagtacaccagcctcatccccaacctgaggaacgtggtcgctctggacacggaggtggccagcaatagaatctactggtctgacctgtcccagagaatgatctgcagcacccagcttgacagagcccacggcgtctcttcctatgacaccgtcatcagcagagacatccaggcccccgacgggctggctgtggactggatccacagcaacatctactggaccgactctgtcctgggcactgtctctgttgcggataccaagggcgtgaagaggaaaacgttattcagggagaacggctccaagccaagggccatcgtggtggatcctgttcatggcttcatgtactggactgactggggaactcccgccaagatcaagaaagggggcctgaatggtgtggacatctactcgctggtgactgaaaacattcagtggcccaatggcatcaccctagatctcctcagtggccgcctctactgggttgactccaaacttcactccatctcaagcatcgatgtcaacgggggcaaccggaagaccatcttggaggatgaaaagaggctggcccaccccttctccttggccgtctttgaggacaaagtattttggacagatatcatcaacgaagccattttcagtgccaaccgcctcacaggttccgatgtcaacttgttggctgaaaacctactgtccccagaggatatggttctcttccacaacctcacccagccaagaggagtgaactggtgtgagaggaccaccctgagcaatggcggctgccagtatctgtgcctccctgccccgcagatcaacccccactcgcccaagtttacctgcgcctgcccggacggcatgctgctggccagggacatgaggagctgcctcacagaggctgaggctgcagtggccacccaggagacatccaccgtcaggctaaaggtcagctccacagccgtaaggacacagcacacaaccacccgacctgttcccgacacctcccggctgcctggggccacccctgggctcaccacggtggagatagtgacaatgtctcaccaagctctgggcgacgttgctggcagaggaaatgagaagaagcccagtagcgtgagggctctgtccattgtcctccccatcgtgctcctcgtcttcctttgcctgggggtcttccttctatggaagaactggcggcttaagaacatcaacagcatcaactttgacaaccccgtctatcagaagaccacagaggatgaggtccacatttgccacaaccaggacggctacagctacccctcgagacagatggtcagtctggaggatgacgtggcgtgaacatctgcctggagtcccgtccctgcccagaacccttcctgagacctcgccggccttgttttattcaaagacagagaagaccaaagcattgcctgccagagctttgttttatatatttattcatctgggaggcagaacaggcttcggacagtgcccatgcaatggcttgggttgggattttggtttcttcctttcctcgtgaaggataagagaaacaggcccggggggaccaggatgacacctccatttctctccaggaagttttgagtttctctccaccgtgacacaatcctcaaacatggaagatgaaaggggaggggatgtcaggcccagagaagcaagtggctttcaacacacaacagcagatggcaccaacgggaccccctggccctgcctcatccaccaatctctaagccaaacccctaaactcaggagtcaacgtgtttacctcttctatgcaagccttgctagacagccaggttagcctttgccctgtcacccccgaatcatgacccacccagtgtctttcgaggtgggtttgtaccttccttaagccaggaaagggattcatggcgtcggaaatgatctggctgaatccgtggtggcaccgagaccaaactcattcaccaaatgatgccacttcccagaggcagagcctgagtcactggtcacccttaatatttattaagtgcctgagacacccggttaccttggccgtgaggacacgtggcctgcacccaggtgtggctgtcaggacaccagcctggtgcccatcctcccgacccctacccacttccattcccgtggtctccttgcactttctcagttcagagttgtacactgtgtacatttggcatttgtgttattattttgcactgttttctgtcgtgtgtgttgggatgggatcccaggccagggaaagcccgtgtcaatgaatgccggggacagagaggggcaggttgaccgggacttcaaagccgtgatcgtgaatatcgagaactgccattgtcgtctttatgtccgcccacctagtgcttccacttctatgcaaatgcctccaagccattcacttccccaatcttgtcgttgatgggtatgtgtttaaaacatgcacggtgaggccgggcgcagtggctcacgcctgtaatcccagcactttgggaggccgaggcgggtggatcatgaggtcaggagatcgagaccatcctggctaacacgtgaaaccccgtctctactaaaaatacaaaaaattagccgggcgtggtggcgggcacctgtagtcccagctactcgggaggctgaggcaggagaatggtgtgaacccgggaagcggagcttgcagtgagccgagattgcgccactgcagtccgcagtctggcctgggcgacagagcgagactccgtctcaaaaaaaaaaaacaaaaaaaaaccatgcatggtgcatcagcagcccatggcctctggccaggcatggcgaggctgaggtgggaggatggtttgagctcaggcatttgaggctgtcgtgagctatgattatgccactgctttccagcctgggcaacatagtaagaccccatctcttaaaaaatgaatttggccagacacaggtgcctcacgcctgtaatcccagcactttgggaggctgagctggatcacttgagttcaggagttggagaccaggcctgagcaacaaagcgagatcccatctctacaaaaaccaaaaagttaaaaatcagctgggtacggtggcacgtgcctgtgatcccagctacttgggaggctgaggcaggaggatcgcctgagcccaggaggtggaggttgcagtgagccatgatcgagccactgcactccagcctgggcaacagatgaagaccctatttcagaaatacaactataaaaaaataaataaatcctccagtctggatcgtttgacgggacttcaggttctttctgaaatcgccgtgttactgttgcactgatgtccggagagacagtgacagcctccgtcagactcccgcgtgaagatgtcacaagggattggcaattgtccccagggacaaaacactgtgtcccccccagtgcagggaaccgtgataagcctttctggtttcggagcacgtaaatgcgtccctgtacagatagtggggattttttgttatgtttgcactttgtatattggttgaaactgttatcacttatatatatatatatacacacatatatataaaatctatttatttttgcaaaccctggttgctgtatttgttcagtgactattctcggggccctgtgtagggggttattgcctctgaaatgcctcttctttatgtacaaagattatttgcacgaactggactgtgtgcaacgctttttgggagaatgatgtccccgttgtatgtatgagtggcttctgggagatgggtgtcactttttaaaccactgtatagaaggtttttgtagcctgaatgtcttactgtgatcaattaaatttcttaaatgaaccaa

SEQ ID NO: 351 - DNA, 5167 bp, synthetic construct
  misc_feature 1..5167: note = Synthetic
  source 1..5167: mol_type = other DNA
gtgcaatcgcgggaagccagggtttccagctaggacacagcaggtcgtgatccgggtcgggacactgcctggcagaggctgcgagcatggggccctggggctggaaattgcgctggaccgtcgccttgctcctcgccgcggcggggactgcagtgggcgacagatgcgaaagaaacgagttccagtgccaagacgggaaatgcatctcctacaagtgggtctgcgatggcagcgctgagtgccaggatggctctgatgagtcccaggagacgtgcttgtctgtcacctgcaaatccggggacttcagctgtgggggccgtgtcaaccgctgcattcctcagttctggaggtgcgatggccaagtggactgcgacaacggctcagacgagcaaggctgtccccccaagacgtgctcccaggacgagtttcgctgccacgatgggaagtgcatctctcggcagttcgtctgtgactcagaccgggactgcttggacggctcagacgaggcctcctgcccggtgctcacctgtggtcccgccagcttccagtgcaacagctccacctgcatcccccagctgtgggcctgcgacaacgaccccgactgcgaagatggctcggatgagtggccgcagcgctgtaggggtctttacgtgttccaaggggacagtagcccctgctcggccttcgagttccactgcctaagtggcgagtgcatccactccagctggcgctgtgatggtggccccgactgcaaggacaaatctgacgaggaaaactgcgctgtggccacctgtcgccctgacgaattccagtgctctgatggaaactgcatccatggcagccggcagtgtgaccgggaatatgactgcaaggacatgagcgatgaagttggctgcgttaatgtgacactctgcgagggacccaacaagttcaagtgtcacagcggcgaatgcatcaccctggacaaagtctgcaacatggctagagactgccgggactggtcagatgaacccatcaaagagtgcgggaccaacgaatgcttggacaacaacggcggctgttcccacgtctgcaatgaccttaagatcggctacgagtgcctgtgccccgacggcttccagctggtggcccagcgaagatgcgaagatatcgatgagtgtcaggatcccgacacctgcagccagctctgcgtgaacctggagggtggctacaagtgccagtgtgaggaaggcttccagctggacccccacacgaaggcctgcaaggctgtgggctccatcgcctacctcttcttcaccaaccggcacgaggtcaggaagatgacgctggaccggagcgagtacaccagcctcatccccaacctgaggaacgtggtcgctctggacacggaggtggccagcaatagaatctactggtctgacctgtcccagagaatgatctgcagcacccagcttgacagagcccacggcgtctcttcctatgacaccgtcatcagcagagacatccaggcccccgacgggctggctgtggactggatccacagcaacatctactggaccgactctgtcctgggcactgtctctgttgcggataccaagggcgtgaagaggaaaacgttattcagggagaacggctccaagccaagggccatcgtggtggatcctgttcatggcttcatgtactggactgactggggaactcccgccaagatcaagaaagggggcctgaatggtgtggacatctactcgctggtgactgaaaacattcagtggcccaatggcatcaccctagatctcctcagtggccgcctctactgggttgactccaaacttcactccatctcaagcatcgatgtcaacgggggcaaccggaagaccatcttggaggatgaaaagaggctggcccaccccttctccttggccgtctttgaggacaaagtattttggacagatatcatcaacgaagccattttcagtgccaaccgcctcacaggttccgatgtcaacttgttggctgaaaacctactgtccccagaggatatggttctcttccacaacctcacccagccaagaggagtgaactggtgtgagaggaccaccctgagcaatggcggctgccagtatctgtgcctccctgccccgcagatcaacccccactcgcccaagtttacctgcgcctgcccggacggcatgctgctggccagggacatgaggagctgcctcacagaggctgaggctgcagtggccacccaggagacatccaccgtcaggctaaaggtcagctccacagccgtaaggacacagcacacaaccacccgacctgttcccgacacctcccggctgcctggggccacccctgggctcaccacggtggagatagtgacaatgtctcaccaagctctgggcgacgttgctggcagaggaaatgagaagaagcccagtagcgtgagggctctgtccattgtcctccccatcgtgctcctcgtcttcctttgcctgggggtcttccttctatggaagaactggcggcttaagaacatcaacagcatcaactttgacaaccccgtctatcagaagaccacagaggatgaggtccacatttgccacaaccaggacggctacagctacccctcgatggtcagtctggaggatgacgtggcgtgaacatctgcctggagtcccgtccctgcccagaacccttcctgagacctcgccggccttgttttattcaaagacagagaagaccaaagcattgcctgccagagctttgttttatatatttattcatctgggaggcagaacaggcttcggacagtgcccatgcaatggcttgggttgggattttggtttcttcctttcctcgtgaaggataagagaaacaggcccggggggaccaggatgacacctccatttctctccaggaagttttgagtttctctccaccgtgacacaatcctcaaacatggaagatgaaaggggaggggatgtcaggcccagagaagcaagtggctttcaacacacaacagcagatggcaccaacgggaccccctggccctgcctcatccaccaatctctaagccaaacccctaaactcaggagtcaacgtgtttacctcttctatgcaagccttgctagacagccaggttagcctttgccctgtcacccccgaatcatgacccacccagtgtctttcgaggtgggtttgtaccttccttaagccaggaaagggattcatggcgtcggaaatgatctggctgaatccgtggtggcaccgagaccaaactcattcaccaaatgatgccacttcccagaggcagagcctgagtcactggtcacccttaatatttattaagtgcctgagacacccggttaccttggccgtgaggacacgtggcctgcacccaggtgtggctgtcaggacaccagcctggtgcccatcctcccgacccctacccacttccattcccgtggtctccttgcactttctcagttcagagttgtacactgtgtacatttggcatttgtgttattattttgcactgttttctgtcgtgtgtgttgggatgggatcccaggccagggaaagcccgtgtcaatgaatgccggggacagagaggggcaggttgaccgggacttcaaagccgtgatcgtgaatatcgagaactgccattgtcgtctttatgtccgcccacctagtgcttccacttctatgcaaatgcctccaagccattcacttccccaatcttgtcgttgatgggtatgtgtttaaaacatgcacggtgaggccgggcgcagtggctcacgcctgtaatcccagcactttgggaggccgaggcgggtggatcatgaggtcaggagatcgagaccatcctggctaacacgtgaaaccccgtctctactaaaaatacaaaaaattagccgggcgtggtggcgggcacctgtagtcccagctactcgggaggctgaggcaggagaatggtgtgaacccgggaagcggagcttgcagtgagccgagattgcgccactgcagtccgcagtctggcctgggcgacagagcgagactccgtctcaaaaaaaaaaaacaaaaaaaaaccatgcatggtgcatcagcagcccatggcctctggccaggcatggcgaggctgaggtgggaggatggtttgagctcaggcatttgaggctgtcgtgagctatgattatgccactgctttccagcctgggcaacatagtaagaccccatctcttaaaaaatgaatttggccagacacaggtgcctcacgcctgtaatcccagcactttgggaggctgagctggatcacttgagttcaggagttggagaccaggcctgagcaacaaagcgagatcccatctctacaaaaaccaaaaagttaaaaatcagctgggtacggtggcacgtgcctgtgatcccagctacttgggaggctgaggcaggaggatcgcctgagcccaggaggtggaggttgcagtgagccatgatcgagccactgcactccagcctgggcaacagatgaagaccctatttcagaaatacaactataaaaaaataaataaatcctccagtctggatcgtttgacgggacttcaggttctttctgaaatcgccgtgttactgttgcactgatgtccggagagacagtgacagcctccgtcagactcccgcgtgaagatgtcacaagggattggcaattgtccccagggacaaaacactgtgtcccccccagtgcagggaaccgtgataagcctttctggtttcggagcacgtaaatgcgtccctgtacagatagtggggattttttgttatgtttgcactttgtatattggttgaaactgttatcacttatatatatatatatacacacatatatataaaatctatttatttttgcaaaccctggttgctgtatttgttcagtgactattctcggggccctgtgtagggggttattgcctctgaaatgcctcttctttatgtacaaagattatttgcacgaactggactgtgtgcaacgctttttgggagaatgatgtccccgttgtatgtatgagtggcttctgggagatgggtgtcactttttaaaccactgtatagaaggtttttgtagcctgaatgtcttactgtgatcaattaaatttcttaaatgaaccaa

SEQ ID NO: 352 - DNA, 5095 bp, synthetic construct
  misc_feature 1..5095: note = Synthetic
  source 1..5095: mol_type = other DNA
gtgcaatcgcgggaagccagggtttccagctaggacacagcaggtcgtgatccgggtcgggacactgcctggcagaggctgcgagcatggggccctggggctggaaattgcgctggaccgtcgccttgctcctcgccgcggcggggactgcagtgggcgacagatgcgaaagaaacgagttccagtgccaagacgggaaatgcatctcctacaagtgggtctgcgatggcagcgctgagtgccaggatggctctgatgagtcccaggagacgtgcttgtctgtcacctgcaaatccggggacttcagctgtgggggccgtgtcaaccgctgcattcctcagttctggaggtgcgatggccaagtggactgcgacaacggctcagacgagcaaggctgtccccccaagacgtgctcccaggacgagtttcgctgccacgatgggaagtgcatctctcggcagttcgtctgtgactcagaccgggactgcttggacggctcagacgaggcctcctgcccggtgctcacctgtggtcccgccagcttccagtgcaacagctccacctgcatcccccagctgtgggcctgcgacaacgaccccgactgcgaagatggctcggatgagtggccgcagcgctgtaggggtctttacgtgttccaaggggacagtagcccctgctcggccttcgagttccactgcctaagtggcgagtgcatccactccagctggcgctgtgatggtggccccgactgcaaggacaaatctgacgaggaaaactgcgctgtggccacctgtcgccctgacgaattccagtgctctgatggaaactgcatccatggcagccggcagtgtgaccgggaatatgactgcaaggacatgagcgatgaagttggctgcgttaatgtgacactctgcgagggacccaacaagttcaagtgtcacagcggcgaatgcatcaccctggacaaagtctgcaacatggctagagactgccgggactggtcagatgaacccatcaaagagtgcgggaccaacgaatgcttggacaacaacggcggctgttcccacgtctgcaatgaccttaagatcggctacgagtgcctgtgccccgacggcttccagctggtggcccagcgaagatgcgaagatatcgatgagtgtcaggatcccgacacctgcagccagctctgcgtgaacctggagggtggctacaagtgccagtgtgaggaaggcttccagctggacccccacacgaaggcctgcaaggctgtgggctccatcgcctacctcttcttcaccaaccggcacgaggtcaggaagatgacgctggaccggagcgagtacaccagcctcatccccaacctgaggaacgtggtcgctctggacacggaggtggccagcaatagaatctactggtctgacctgtcccagagaatgatctgcagcacccagcttgacagagcccacggcgtctcttcctatgacaccgtcatcagcagagacatccaggcccccgacgggctggctgtggactggatccacagcaacatctactggaccgactctgtcctgggcactgtctctgttgcggataccaagggcgtgaagaggaaaacgttattcagggagaacggctccaagccaagggccatcgtggtggatcctgttcatggcttcatgtactggactgactggggaactcccgccaagatcaagaaagggggcctgaatggtgtggacatctactcgctggtgactgaaaacattcagtggcccaatggcatcaccctagatctcctcagtggccgcctctactgggttgactccaaacttcactccatctcaagcatcgatgtcaacgggggcaaccggaagaccatcttggaggatgaaaagaggctggcccaccccttctccttggccgtctttgaggacaaagtattttggacagatatcatcaacgaagccattttcagtgccaaccgcctcacaggttccgatgtcaacttgttggctgaaaacctactgtccccagaggatatggttctcttccacaacctcacccagccaagaggagtgaactggtgtgagaggaccaccctgagcaatggcggctgccagtatctgtgcctccctgccccgcagatcaacccccactcgcccaagtttacctgcgcctgcccggacggcatgctgctggccagggacatgaggagctgcctcacagaggctgaggctgcagtggccacccaggagacatccaccgtcaggctaaaggtcagctccacagccgtaaggacacagcacacaaccacccgacctgttcccgacacctcccggctgcctggggccacccctgggctcaccacggtggagatagtgacaatgtctcaccaagtgctcctcgtcttcctttgcctgggggtcttccttctatggaagaactggcggcttaagaacatcaacagcatcaactttgacaaccccgtctatcagaagaccacagaggatgaggtccacatttgccacaaccaggacggctacagctacccctcgagacagatggtcagtctggaggatgacgtggcgtgaacatctgcctggagtcccgtccctgcccagaacccttcctgagacctcgccggccttgttttattcaaagacagagaagaccaaagcattgcctgccagagctttgttttatatatttattcatctgggaggcagaacaggcttcggacagtgcccatgcaatggcttgggttgggattttggtttcttcctttcctcgtgaaggataagagaaacaggcccggggggaccaggatgacacctccatttctctccaggaagttttgagtttctctccaccgtgacacaatcctcaaacatggaagatgaaaggggaggggatgtcaggcccagagaagcaagtggctttcaacacacaacagcagatggcaccaacgggaccccctggccctgcctcatccaccaatctctaagccaaacccctaaactcaggagtcaacgtgtttacctcttctatgcaagccttgctagacagccaggttagcctttgccctgtcacccccgaatcatgacccacccagtgtctttcgaggtgggtttgtaccttccttaagccaggaaagggattcatggcgtcggaaatgatctggctgaatccgtggtggcaccgagaccaaactcattcaccaaatgatgccacttcccagaggcagagcctgagtcactggtcacccttaatatttattaagtgcctgagacacccggttaccttggccgtgaggacacgtggcctgcacccaggtgtggctgtcaggacaccagcctggtgcccatcctcccgacccctacccacttccattcccgtggtctccttgcactttctcagttcagagttgtacactgtgtacatttggcatttgtgttattattttgcactgttttctgtcgtgtgtgttgggatgggatcccaggccagggaaagcccgtgtcaatgaatgccggggacagagaggggcaggttgaccgggacttcaaagccgtgatcgtgaatatcgagaactgccattgtcgtctttatgtccgcccacctagtgcttccacttctatgcaaatgcctccaagccattcacttccccaatcttgtcgttgatgggtatgtgtttaaaacatgcacggtgaggccgggcgcagtggctcacgcctgtaatcccagcactttgggaggccgaggcgggtggatcatgaggtcaggagatcgagaccatcctggctaacacgtgaaaccccgtctctactaaaaatacaaaaaattagccgggcgtggtggcgggcacctgtagtcccagctactcgggaggctgaggcaggagaatggtgtgaacccgggaagcggagcttgcagtgagccgagattgcgccactgcagtccgcagtctggcctgggcgacagagcgagactccgtctcaaaaaaaaaaaacaaaaaaaaaccatgcatggtgcatcagcagcccatggcctctggccaggcatggcgaggctgaggtgggaggatggtttgagctcaggcatttgaggctgtcgtgagctatgattatgccactgctttccagcctgggcaacatagtaagaccccatctcttaaaaaatgaatttggccagacacaggtgcctcacgcctgtaatcccagcactttgggaggctgagctggatcacttgagttcaggagttggagaccaggcctgagcaacaaagcgagatcccatctctacaaaaaccaaaaagttaaaaatcagctgggtacggtggcacgtgcctgtgatcccagctacttgggaggctgaggcaggaggatcgcctgagcccaggaggtggaggttgcagtgagccatgatcgagccactgcactccagcctgggcaacagatgaagaccctatttcagaaatacaactataaaaaaataaataaatcctccagtctggatcgtttgacgggacttcaggttctttctgaaatcgccgtgttactgttgcactgatgtccggagagacagtgacagcctccgtcagactcccgcgtgaagatgtcacaagggattggcaattgtccccagggacaaaacactgtgtcccccccagtgcagggaaccgtgataagcctttctggtttcggagcacgtaaatgcgtccctgtacagatagtggggattttttgttatgtttgcactttgtatattggttgaaactgttatcacttatatatatatatatacacacatatatataaaatctatttatttttgcaaaccctggttgctgtatttgttcagtgactattctcggggccctgtgtagggggttattgcctctgaaatgcctcttctttatgtacaaagattatttgcacgaactggactgtgtgcaacgctttttgggagaatgatgtccccgttgtatgtatgagtggcttctgggagatgggtgtcactttttaaaccactgtatagaaggtttttgtagcctgaatgtcttactgtgatcaattaaatttcttaaatgaaccaa

SEQ ID NO: 353 - protein, 948 aa, synthetic construct
  REGION 1..948: note = Synthetic
MGPWGWKLRWTVALLLAAAGTAVGDRCERNEFQCQDGKCISYKWVCDGSAECQDGSDESQETCLSVTCKSGDFSCGGRVNRCIPQFWRCDGQVDCDNGSDEQGCPPKTCSQDEFRCHDGKCISRQFVCDSDRDCLDGSDEASCPVLTCGPASFQCNSSTCIPQLWACDNDPDCEDGSDEWPQRCRGLYVFQGDSSPCSAFEFHCLSGECIHSSWRCDGGPDCKDKSDEENCAVATCRPDEFQCSDGNCIHGSRQCDREYDCKDMSDEVGCVNVTLCEGPNKFKCHSGECITLDKVCNMARDCRDWSDEPIKECGTNECLDNNGGCSHVCNDLKIGYECLCPDGFQLVAQRRCEDIDECQDPDTCSQLCVNLEGGYKCQCEEGFQLDPHTKACKAVGSIAYLFFTNRHEVRKMTLDRSEYTSLIPNLRNVVALDTEVASNRIYWSDLSQRMICSTQLDRAHGVSSYDTVISRDIQAPDGLAVDWIHSNIYWTDSVLGTVSVADTKGVKRKTLFRENGSKPRAIVVDPVHGFMYWTDWGTPAKIKKGGLNGVDIYSLVTENIQWPNGITLDLLSGRLYWVDSKLHSISSIDVNGGNRKTILEDEKRLAHPFSLAVFEDKVFWTDIINEAIFSANRLTGSDVNLLAENLLSPEDMVLFHNLTQPRGVNWCERTTLSNGGCQYLCLPAPQINPHSPKFTCACPDGMLLARDMRSCLTEAEAAVATQETSTVRLKVSSTAVRTQHTTTRPVPDTSRLPGATPGLTTVEIVTMSHQALGDVAGRGNEKKPSSVRALSIVLPIATELGLWSRGQLCDRACLSLQCSSSSFAWGSSFYGRTGGLRTSTASTLTTPSIRRPQRMRSTFATTRTATATPRDRWSVWRMTWREHLPGVPSLPRTLPETSPALFYSKTEKTKALPARALFYIFIHLGGRTGFGQCPCNGLGWDFGFFLSS

SEQ ID NO: 354 - protein, 858 aa, synthetic construct
  REGION 1..858: note = Synthetic
MGPWGWKLRWTVALLLAAAGTAVGDRCERNEFQCQDGKCISYKWVCDGSAECQDGSDESQETCLSVTCKSGDFSCGGRVNRCIPQFWRCDGQVDCDNGSDEQGCPPKTCSQDEFRCHDGKCISRQFVCDSDRDCLDGSDEASCPVLTCGPASFQCNSSTCIPQLWACDNDPDCEDGSDEWPQRCRGLYVFQGDSSPCSAFEFHCLSGECIHSSWRCDGGPDCKDKSDEENCAVATCRPDEFQCSDGNCIHGSRQCDREYDCKDMSDEVGCVNVTLCEGPNKFKCHSGECITLDKVCNMARDCRDWSDEPIKECGTNECLDNNGGCSHVCNDLKIGYECLCPDGFQLVAQRRCEDIDECQDPDTCSQLCVNLEGGYKCQCEEGFQLDPHTKACKAVGSIAYLFFTNRHEVRKMTLDRSEYTSLIPNLRNVVALDTEVASNRIYWSDLSQRMICSTQLDRAHGVSSYDTVISRDIQAPDGLAVDWIHSNIYWTDSVLGTVSVADTKGVKRKTLFRENGSKPRAIVVDPVHGFMYWTDWGTPAKIKKGGLNGVDIYSLVTENIQWPNGITLDLLSGRLYWVDSKLHSISSIDVNGGNRKTILEDEKRLAHPFSLAVFEDKVFWTDIINEAIFSANRLTGSDVNLLAENLLSPEDMVLFHNLTQPRGVNWCERTTLSNGGCQYLCLPAPQINPHSPKFTCACPDGMLLARDMRSCLTEAEAAVATQETSTVRLKVSSTAVRTQHTTTRPVPDTSRLPGATPGLTTVEIVTMSHQALGDVAGRGNEKKPSSVRALSIVLPIVLLVFLCLGVFLLWKNWRLKNINSINFDNPVYQKTTEDEVHICHNQDGYSYPSMVSLEDDVA

SEQ ID NO: 355 - protein, 834 aa, synthetic construct
  REGION 1..834: note = Synthetic
MGPWGWKLRWTVALLLAAAGTAVGDRCERNEFQCQDGKCISYKWVCDGSAECQDGSDESQETCLSVTCKSGDFSCGGRVNRCIPQFWRCDGQVDCDNGSDEQGCPPKTCSQDEFRCHDGKCISRQFVCDSDRDCLDGSDEASCPVLTCGPASFQCNSSTCIPQLWACDNDPDCEDGSDEWPQRCRGLYVFQGDSSPCSAFEFHCLSGECIHSSWRCDGGPDCKDKSDEENCAVATCRPDEFQCSDGNCIHGSRQCDREYDCKDMSDEVGCVNVTLCEGPNKFKCHSGECITLDKVCNMARDCRDWSDEPIKECGTNECLDNNGGCSHVCNDLKIGYECLCPDGFQLVAQRRCEDIDECQDPDTCSQLCVNLEGGYKCQCEEGFQLDPHTKACKAVGSIAYLFFTNRHEVRKMTLDRSEYTSLIPNLRNVVALDTEVASNRIYWSDLSQRMICSTQLDRAHGVSSYDTVISRDIQAPDGLAVDWIHSNIYWTDSVLGTVSVADTKGVKRKTLFRENGSKPRAIVVDPVHGFMYWTDWGTPAKIKKGGLNGVDIYSLVTENIQWPNGITLDLLSGRLYWVDSKLHSISSIDVNGGNRKTILEDEKRLAHPFSLAVFEDKVFWTDIINEAIFSANRLTGSDVNLLAENLLSPEDMVLFHNLTQPRGVNWCERTTLSNGGCQYLCLPAPQINPHSPKFTCACPDGMLLARDMRSCLTEAEAAVATQETSTVRLKVSSTAVRTQHTTTRPVPDTSRLPGATPGLTTVEIVTMSHQVLLVFLCLGVFLLWKNWRLKNINSINFDNPVYQKTTEDEVHICHNQDGYSYPSRQMVSLEDDVA

SEQ ID NO: 356-499 - skipped (144 entries)

SEQ ID NO: 500 - DNA, 86 bp, synthetic construct
  misc_feature 1..86: note = Synthetic
  source 1..86: mol_type = other DNA
gtttaagtactctgtgctggaaacagcacagaatctacttaaacaaggcaaaatgccgtgtttatctcgtcaacttgttggcgaga

SEQ ID NO: 501 - DNA, 77 bp, synthetic construct
  misc_feature 1..77: note = Synthetic
  source 1..77: mol_type = other DNA
gttttagtactctggaaacagaatctactaaaacaaggcaaaatgccgtgtttatctcgtcaacttgttggcgagat

SEQ ID NO: 502 - DNA, 87 bp, synthetic construct
  misc_feature 1..87: note = Synthetic
  source 1..87: mol_type = other DNA
gtttaagtactctgtgctggaaacagcacagaatctacttaaacaaggcaaaatgccgtgtttatctcgtcaacttgttggcgagat

SEQ ID NO: 503 - DNA, 77 bp, synthetic construct
  misc_feature 1..77: note = Synthetic
  source 1..77: mol_type = other DNA
gtttaagtactctggaaacagaatctacttaaacaaggcaaaatgccgtgtttatctcgtcaacttgttggcgagat

SEQ ID NO: 504-600 - skipped (97 entries)

SEQ ID NO: 601 - DNA, 86 bp, synthetic construct
  misc_feature 1..86: note = Synthetic
  source 1..86: mol_type = other DNA
gtttaagtactctgtgctggaaacagcacagaatctactgaaacaagacaatatgtcgtgtttatcccatcaatttattggtggga

SEQ ID NO: 602-899 - skipped (298 entries)

SEQ ID NO: 900 - DNA, 77 bp, synthetic construct
  misc_feature 1..77: note = Synthetic
  source 1..77: mol_type = other DNA
gttttagtactctggaaacagaatctactgaaacaagacaatatgtcgtgtttatcccatcaatttattggtgggat

SEQ ID NO: 901 - DNA, 77 bp, synthetic construct
  misc_feature 1..77: note = Synthetic
  source 1..77: mol_type = other DNA
gtttcagtactctggaaacagaatctactgaaacaagacaatatgtcgtgtttatcccatcaatttattggtgggat

SEQ ID NO: 902 - DNA, 77 bp, synthetic construct
  misc_feature 1..77: note = Synthetic
  source 1..77: mol_type = other DNA
gtttggtaacctaggaaactagatcttaccaaacaagacaatatgtcgtgtttatcccatcaatttattggtgggat

SEQ ID NO: 903 - DNA, 77 bp, synthetic construct
  misc_feature 1..77: note = Synthetic
  source 1..77: mol_type = other DNA
gtttcagtactctggaaacagaatctactgaaacaaggcaaaatgccgtgtttatcccatcaatttattggtgggat

SEQ ID NO: 904 - DNA, 77 bp, synthetic construct
  misc_feature 1..77: note = Synthetic
  source 1..77: mol_type = other DNA
gtttcagtactctggaaacagaatctactgaaacaagacaatatgtcgcgcccatcccatcaatttattggtgggat

SEQ ID NO: 905 - DNA, 77 bp, synthetic construct
  misc_feature 1..77: note = Synthetic
  source 1..77: mol_type = other DNA
gtttcagtactctggaaacagaatctactgaaacaagacaatatgtcgtgtttatgggttgaatttattcgacccat

SEQ ID NO: 906 - DNA, 77 bp, synthetic construct
  misc_feature 1..77: note = Synthetic
  source 1..77: mol_type = other DNA
gtttggtaacctaggaaactagatcttaccaaacaaggcaaaatgccgtgtttatcccatcaatttattggtgggat

SEQ ID NO: 907 - DNA, 77 bp, synthetic construct
  misc_feature 1..77: note = Synthetic
  source 1..77: mol_type = other DNA
gtttggtaacctaggaaactagatcttaccaaacaagacaatatgtcgcgcccatcccatcaatttattggtgggat

SEQ ID NO: 908 - DNA, 77 bp, synthetic construct
  misc_feature 1..77: note = Synthetic
  source 1..77: mol_type = other DNA
gtttggtaacctaggaaactagatcttaccaaacaagacaatatgtcgtgtttatgggttgaatttattcgacccat

SEQ ID NO: 909 - DNA, 77 bp, synthetic construct
  misc_feature 1..77: note = Synthetic
  source 1..77: mol_type = other DNA
gtttcagtactctggaaacagaatctactgaaacaaggcaaaatgccgcgcccatcccatcaatttattggtgggat

SEQ ID NO: 910 - DNA, 77 bp, synthetic construct
  misc_feature 1..77: note = Synthetic
  source 1..77: mol_type = other DNA
gtttcagtactctggaaacagaatctactgaaacaaggcaaaatgccgtgtttatgggttgaatttattcgacccat

SEQ ID NO: 911 - DNA, 77 bp, synthetic construct
  misc_feature 1..77: note = Synthetic
  source 1..77: mol_type = other DNA
gtttcagtactctggaaacagaatctactgaaacaagacaatatgtcgcgcccatgggttgaatttattcgacccat

SEQ ID NO: 912 - DNA, 77 bp, synthetic construct
  misc_feature 1..77: note = Synthetic
  source 1..77: mol_type = other DNA
gtttggtaacctaggaaactagatcttaccaaacaaggcaaaatgccgcgcccatcccatcaatttattggtgggat

SEQ ID NO: 913 - DNA, 77 bp, synthetic construct
  misc_feature 1..77: note = Synthetic
  source 1..77: mol_type = other DNA
gtttggtaacctaggaaactagatcttaccaaacaaggcaaaatgccgtgtttatgggttgaatttattcgacccat

SEQ ID NO: 914 - DNA, 77 bp, synthetic construct
  misc_feature 1..77: note = Synthetic
  source 1..77: mol_type = other DNA
gtttggtaacctaggaaactagatcttaccaaacaagacaatatgtcgcgcccatgggttgaatttattcgacccat

SEQ ID NO: 915 - DNA, 77 bp, synthetic construct
  misc_feature 1..77: note = Synthetic
  source 1..77: mol_type = other DNA
gtttcagtactctggaaacagaatctactgaaacaaggcaaaatgccgcgcccatgggttgaatttattcgacccat

SEQ ID NO: 916 - DNA, 77 bp, synthetic construct
  misc_feature 1..77: note = Synthetic
  source 1..77: mol_type = other DNA
gtttggtaacctaggaaactagatcttaccaaacaaggcaaaatgccgcgcccatgggttgaatttattcgacccat

SEQ ID NO: 917 - DNA, 87 bp, synthetic construct
  misc_feature 1..87: note = Synthetic
  source 1..87: mol_type = other DNA
gtttcagtactctgtgctggaaacagcacagaatctactgaaacaagacaatatgtcgtgtttatcccatcaatttattggtgggat

SEQ ID NO: 918-931 - skipped (14 entries)

SEQ ID NO: 932 - DNA, 77 bp, synthetic construct
  misc_feature 1..77: note = Synthetic
  source 1..77: mol_type = other DNA
gtttcagtactctggaaacagaatctactgaaacaaggcaaaatgccgtgtttatctcgtcaacttgttggcgagat

SEQ ID NO: 933-999 - skipped (67 entries)

SEQ ID NO: 1000 - DNA, 22 bp, synthetic construct
  misc_feature 1..22: note = Synthetic
  source 1..22: mol_type = other DNA
tgtttgcagacctcctgccacc

SEQ ID NO: 1001 - DNA, 22 bp, synthetic construct
  misc_feature 1..22: note = Synthetic
  source 1..22: mol_type = other DNA
ctgccaccgcagattcaggctt

SEQ ID NO: 1002 - DNA, 22 bp, synthetic construct
  misc_feature 1..22: note = Synthetic
  source 1..22: mol_type = other DNA
aggattgctgaattatttcttc

SEQ ID NO: 1003 - DNA, 22 bp, synthetic construct
  misc_feature 1..22: note = Synthetic
  source 1..22: mol_type = other DNA
aattatttcttccccagttgca

SEQ ID NO: 1004 - DNA, 22 bp, synthetic construct
  misc_feature 1..22: note = Synthetic
  source 1..22: mol_type = other DNA
cagttgcattcaatgttctgac

SEQ ID NO: 1005 - DNA, 22 bp, synthetic construct
  misc_feature 1..22: note = Synthetic
  source 1..22: mol_type = other DNA
ttctgacaacagtttgccgctg

SEQ ID NO: 1006 - DNA, 22 bp, synthetic construct
  misc_feature 1..22: note = Synthetic
  source 1..22: mol_type = other DNA
caatgccatcctggagttcctg

SEQ ID NO: 1007 - DNA, 22 bp, synthetic construct
  misc_feature 1..22: note = Synthetic
  source 1..22: mol_type = other DNA
taagataccaaaaaggcaaaac

SEQ ID NO: 1008 - DNA, 22 bp, synthetic construct
  misc_feature 1..22: note = Synthetic
  source 1..22: mol_type = other DNA
aaaaaagaggtagggcgacaga

SEQ ID NO: 1009 - DNA, 22 bp, synthetic construct
  misc_feature 1..22: note = Synthetic
  source 1..22: mol_type = other DNA
gacagaaaaaagaggtagggcg

SEQ ID NO: 1010 - DNA, 22 bp, synthetic construct
  misc_feature 1..22: note = Synthetic
  source 1..22: mol_type = other DNA
aaacagctgtcagacagaaaaa

SEQ ID NO: 1011 - DNA, 22 bp, synthetic construct
  misc_feature 1..22: note = Synthetic
  source 1..22: mol_type = other DNA
gaagcctgaatctgcggtggca

SEQ ID NO: 1012 - DNA, 22 bp, synthetic construct
  misc_feature 1..22: note = Synthetic
  source 1..22: mol_type = other DNA
gaaaaattgggaagcctgaatc

SEQ ID NO: 1013 - DNA, 22 bp, synthetic construct
  misc_feature 1..22: note = Synthetic
  source 1..22: mol_type = other DNA
acagatgccagtattctacagg

SEQ ID NO: 1014 - DNA, 22 bp, synthetic construct
  misc_feature 1..22: note = Synthetic
  source 1..22: mol_type = other DNA
tcagcaatcctcaaaaacagat

SEQ ID NO: 1015 - DNA, 22 bp, synthetic construct
  misc_feature 1..22: note = Synthetic
  source 1..22: mol_type = other DNA
aataattcagcaatcctcaaaa

SEQ ID NO: 1016 - DNA, 22 bp, synthetic construct
  misc_feature 1..22: note = Synthetic
  source 1..22: mol_type = other DNA
gcaactggggaagaaataattc

SEQ ID NO: 1017 - DNA, 22 bp, synthetic construct
  misc_feature 1..22: note = Synthetic
  source 1..22: mol_type = other DNA
cattgaatgcaactggggaaga

SEQ ID NO: 1018 - DNA, 22 bp, synthetic construct
  misc_feature 1..22: note = Synthetic
  source 1..22: mol_type = other DNA
gaacattgaatgcaactgggga

SEQ ID NO: 1019 - DNA, 22 bp, synthetic construct
  misc_feature 1..22: note = Synthetic
  source 1..22: mol_type = other DNA
tcattttttctcataccttctg

SEQ ID NO: 1020 - DNA, 22 bp, synthetic construct
  misc_feature 1..22: note = Synthetic
  source 1..22: mol_type = other DNA
ttttttctcataccttctgctt

SEQ ID NO: 1021 - DNA, 22 bp, synthetic construct
  misc_feature 1..22: note = Synthetic
  source 1..22: mol_type = other DNA
ccttctgcttgatgatcatctc

SEQ ID NO: 1022 - DNA, 22 bp, synthetic construct
  misc_feature 1..22: note = Synthetic
  source 1..22: mol_type = other DNA
atgatcatctcgttgatatcct

SEQ ID NO: 1023 - DNA, 22 bp, synthetic construct
  misc_feature 1..22: note = Synthetic
  source 1..22: mol_type = other DNA
aaggtcacccaccatcaccctc

SEQ ID NO: 1024 - DNA, 22 bp, synthetic construct
  misc_feature 1..22: note = Synthetic
  source 1..22: mol_type = other DNA
atcaccctctgtgattttataa

SEQ ID NO: 1025 - DNA, 22 bp, synthetic construct
  misc_feature 1..22: note = Synthetic
  source 1..22: mol_type = other DNA
ataacttgatcaagcagagaaa

SEQ ID NO: 1026 - DNA, 22 bp, synthetic construct
  misc_feature 1..22: note = Synthetic
  source 1..22: mol_type = other DNA
cttgatcaagcagagaaagcca

SEQ ID NO: 1027 - DNA, 22 bp, synthetic construct
  misc_feature 1..22: note = Synthetic
  source 1..22: mol_type = other DNA
atcaagcagagaaagccagtcg

SEQ ID NO: 1028 - DNA, 22 bp, synthetic construct
  misc_feature 1..22: note = Synthetic
  source 1..22: mol_type = other DNA
cagtcggtaagttctgtccaag

SEQ ID NO: 1029 - DNA, 22 bp, synthetic construct
  misc_feature 1..22: note = Synthetic
  source 1..22: mol_type = other DNA
gtaagttctgtccaagcccggt

SEQ ID NO: 1030 - DNA, 22 bp, synthetic construct
  misc_feature 1..22: note = Synthetic
  source 1..22: mol_type = other DNA
agcccggttgaaatctgccaga

SEQ ID NO: 1031 - DNA, 22 bp, synthetic construct
  misc_feature 1..22: note = Synthetic
  source 1..22: mol_type = other DNA
agcaggtacctccaacatcaag

SEQ ID NO: 1032 - DNA, 22 bp, synthetic construct
  misc_feature 1..22: note = Synthetic
  source 1..22: mol_type = other DNA
caacatcaaggaagatggcatt

SEQ ID NO: 1033 - DNA, 22 bp, synthetic construct
  misc_feature 1..22: note = Synthetic
  source 1..22: mol_type = other DNA
aggaagatggcatttctagttt

SEQ ID NO: 1034 - DNA, 22 bp, synthetic construct
  misc_feature 1..22: note = Synthetic
  source 1..22: mol_type = other DNA
atggcatttctagtttggagat

SEQ ID NO: 1035 - DNA, 22 bp, synthetic construct
  misc_feature 1..22: note = Synthetic
  source 1..22: mol_type = other DNA
ctagtttggagatggcagtttc

SEQ ID NO: 1036 - DNA, 22 bp, synthetic construct
  misc_feature 1..22: note = Synthetic
  source 1..22: mol_type = other DNA
gatggcagtttccttagtaacc

SEQ ID NO: 1037 - DNA, 22 bp, synthetic construct
  misc_feature 1..22: note = Synthetic
  source 1..22: mol_type = other DNA
ccacaggttgtgtcaccagagt

SEQ ID NO: 1038 - DNA, 22 bp, synthetic construct
  misc_feature 1..22: note = Synthetic
  source 1..22: mol_type = other DNA
gagtaacagtctgagtaggagc

SEQ ID NO: 1039 - DNA, 22 bp, synthetic construct
  misc_feature 1..22: note = Synthetic
  source 1..22: mol_type = other DNA
agaaggtatgagaaaaaatgat

SEQ ID NO: 1040 - DNA, 22 bp, synthetic construct
  misc_feature 1..22: note = Synthetic
  source 1..22: mol_type = other DNA
tcaagcagaaggtatgagaaaa

SEQ ID NO: 1041 - DNA, 22 bp, synthetic construct
  misc_feature 1..22: note = Synthetic
  source 1..22: mol_type = other DNA
tcatcaagcagaaggtatgaga

SEQ ID NO: 1042 - DNA, 22 bp, synthetic construct
  misc_feature 1..22: note = Synthetic
  source 1..22: mol_type = other DNA
tcaacgagatgatcatcaagca

SEQ ID NO: 1043 - DNA, 22 bp, synthetic construct
  misc_feature 1..22: note = Synthetic
  source 1..22: mol_type = other DNA
gtgaccttgaggatatcaacga

SEQ ID NO: 1044 - DNA, 22 bp, synthetic construct
  misc_feature 1..22: note = Synthetic
  source 1..22: mol_type = other DNA
tgggtgaccttgaggatatcaa

SEQ ID NO: 1045 - DNA, 22 bp, synthetic construct
  misc_feature 1..22: note = Synthetic
  source 1..22: mol_type = other DNA
aagttataaaatcacagagggt

SEQ ID NO: 1046 - DNA, 22 bp, synthetic construct
  misc_feature 1..22: note = Synthetic
  source 1..22: mol_type = other DNA
atcaagttataaaatcacagag

SEQ ID NO: 1047 - DNA, 22 bp, synthetic construct
  misc_feature 1..22: note = Synthetic
  source 1..22: mol_type = other DNA
ctttctctgcttgatcaagtta

SEQ ID NO: 1048 - DNA, 22 bp, synthetic construct
  misc_feature 1..22: note = Synthetic
  source 1..22: mol_type = other DNA
ccgactggctttctctgcttga

SEQ ID NO: 1049 - DNA, 22 bp, synthetic construct
  misc_feature 1..22: note = Synthetic
  source 1..22: mol_type = other DNA
acttaccgactggctttctctg

SEQ ID NO: 1050 - DNA, 22 bp, synthetic construct
  misc_feature 1..22: note = Synthetic
  source 1..22: mol_type = other DNA
gatgttggaggtacctgctctg

SEQ ID NO: 1051 - DNA, 22 bp, synthetic construct
  misc_feature 1..22: note = Synthetic
  source 1..22: mol_type = other DNA
aaatgccatcttccttgatgtt

SEQ ID NO: 1052 - DNA, 22 bp, synthetic construct
  misc_feature 1..22: note = Synthetic
  source 1..22: mol_type = other DNA
ccaaactagaaatgccatcttc

SEQ ID NO: 1053 - DNA, 22 bp, synthetic construct
  misc_feature 1..22: note = Synthetic
  source 1..22: mol_type = other DNA
aggaaactgccatctccaaact

SEQ ID NO: 1054 - DNA, 22 bp, synthetic construct
  misc_feature 1..22: note = Synthetic
  source 1..22: mol_type = other DNA
ctgttactctggtgacacaacc

SEQ ID NO: 1055 - DNA, 22 bp, synthetic construct
  misc_feature 1..22: note = Synthetic
  source 1..22: mol_type = other DNA
tagctcctactcagactgttac

SEQ ID NO: 1056 - DNA, 22 bp, synthetic construct
  misc_feature 1..22: note = Synthetic
  source 1..22: mol_type = other DNA
aaaaggtatctttgatactaac

SEQ ID NO: 1057 - DNA, 22 bp, synthetic construct
  misc_feature 1..22: note = Synthetic
  source 1..22: mol_type = other DNA
ctttgatactaaccttggtttc

SEQ ID NO: 1058 - DNA, 22 bp, synthetic construct
  misc_feature 1..22: note = Synthetic
  source 1..22: mol_type = other DNA
aacatttcattcaactgttgcc

SEQ ID NO: 1059 - DNA, 22 bp, synthetic construct
  misc_feature 1..22: note = Synthetic
  source 1..22: mol_type = other DNA
ttcaactgttgcctccggttct

SEQ ID NO: 1060 - DNA, 22 bp, synthetic construct
  misc_feature 1..22: note = Synthetic
  source 1..22: mol_type = other DNA
aggtgttcttgtacttcatccc

SEQ ID NO: 1061 - DNA, 22 bp, synthetic construct
  misc_feature 1..22: note = Synthetic
  source 1..22: mol_type = other DNA
ttctttcaactagaataaaagg

SEQ ID NO: 1062 - DNA, 22 bp, synthetic construct
  misc_feature 1..22: note = Synthetic
  source 1..22: mol_type = other DNA
ttcaactagaataaaaggaaaa

SEQ ID NO: 1063 - DNA, 22 bp, synthetic construct
  misc_feature 1..22: note = Synthetic
  source 1..22: mol_type = other DNA
agaataaaaggaaaaataaata

SEQ ID NO: 1064 - DNA, 22 bp, synthetic construct
  misc_feature 1..22: note = Synthetic
  source 1..22: mol_type = other DNA
gttagtatcaaagatacctttt

SEQ ID NO: 1065 - DNA, 22 bp, synthetic construct
  misc_feature 1..22: note = Synthetic
  source 1..22: mol_type = other DNA
cacagaaaccaaggttagtatc

SEQ ID NO: 1066 - DNA, 22 bp, synthetic construct
  misc_feature 1..22: note = Synthetic
  source 1..22: mol_type = other DNA
aaagaaaatcacagaaaccaag

SEQ ID NO: 1067 - DNA, 22 bp, synthetic construct
  misc_feature 1..22: note = Synthetic
  source 1..22: mol_type = other DNA
tccaaaagaaaatcacagaaac

SEQ ID NO: 1068 - DNA, 22 bp, synthetic construct
  misc_feature 1..22: note = Synthetic
  source 1..22: mol_type = other DNA
atacagtagatgcaatccaaaa

SEQ ID NO: 1069 - DNA, 22 bp, synthetic construct
  misc_feature 1..22: note = Synthetic
  source 1..22: mol_type = other DNA
aggagggtccctatacagtaga

SEQ ID NO: 1070 - DNA, 22 bp, synthetic construct
  misc_feature 1..22: note = Synthetic
  source 1..22: mol_type = other DNA
atggaaggagggtccctataca

SEQ ID NO: 1071 - DNA, 22 bp, synthetic construct
  misc_feature 1..22: note = Synthetic
  source 1..22: mol_type = other DNA
agtcatggaaggagggtcccta

SEQ ID NO: 1072 - DNA, 22 bp, synthetic construct
  misc_feature 1..22: note = Synthetic
  source 1..22: mol_type = other DNA
tggaagctaaggaagaagctga

SEQ ID NO: 1073 - DNA, 22 bp, synthetic construct
  misc_feature 1..22: note = Synthetic
  source 1..22: mol_type = other DNA
aatgaaatgttaaaggattcaa

SEQ ID NO: 1074 - DNA, 22 bp, synthetic construct
  misc_feature 1..22: note = Synthetic
  source 1..22: mol_type = other DNA
agaaccggaggcaacagttgaa

SEQ ID NO: 1075 - DNA, 22 bp, synthetic construct
  misc_feature 1..22: note = Synthetic
  source 1..22: mol_type = other DNA
gaacaccttcagaaccggaggc

SEQ ID NO: 1076 - DNA, 22 bp, synthetic construct
  misc_feature 1..22: note = Synthetic
  source 1..22: mol_type = other DNA
aaagaattcagaatcagtggga

SEQ ID NO: 1077 - DNA, 22 bp, synthetic construct
  misc_feature 1..22: note = Synthetic
  source 1..22: mol_type = other DNA
attctagttgaaagaattcaga

SEQ ID NO: 1078 - DNA, 22 bp, synthetic construct
  misc_feature 1..22: note = Synthetic
  source 1..22: mol_type = other DNA
atatatttatttttccttttat

SEQ ID NO: 1079-1999 - skipped (921 entries)

SEQ ID NO: 2000 - DNA, 22 bp, synthetic construct
  misc_feature 1..22: note = Synthetic
  source 1..22: mol_type = other DNA
ccctacctcttttttctgtctg

SEQ ID NO: 2001 - DNA, 22 bp, synthetic construct
  misc_feature 1..22: note = Synthetic
  source 1..22: mol_type = other DNA
tttttctgtctgacagctgttt

SEQ ID NO: 2002 - DNA, 22 bp, synthetic construct
  misc_feature 1..22: note = Synthetic
  source 1..22: mol_type = other DNA
tgtttgcagacctcctgccacc

SEQ ID NO: 2003 - DNA, 22 bp, synthetic construct
  misc_feature 1..22: note = Synthetic
  source 1..22: mol_type = other DNA
cagacctcctgccaccgcagat

SEQ ID NO: 2004 - DNA, 22 bp, synthetic construct
  misc_feature 1..22: note = Synthetic
  source 1..22: mol_type = other DNA
ttcaggcttcccaatttttcct

SEQ ID NO: 2005 - DNA, 22 bp, synthetic construct
  misc_feature 1..22: note = Synthetic
  source 1..22: mol_type = other DNA
gtagaatactggcatctgtttt

SEQ ID NO: 2006 - DNA, 22 bp, synthetic construct
  misc_feature 1..22: note = Synthetic
  source 1..22: mol_type = other DNA
ggattgctgaattatttcttcc

SEQ ID NO: 2007 - DNA, 22 bp, synthetic construct
  misc_feature 1..22: note = Synthetic
  source 1..22: mol_type = other DNA
agttgcattcaatgttctgaca

SEQ ID NO: 2008 - DNA, 22 bp, synthetic construct
  misc_feature 1..22: note = Synthetic
  source 1..22: mol_type = other DNA
tgccgctgcccaatgccatcct

SEQ ID NO: 2009 - DNA, 22 bp, synthetic construct
  misc_feature 1..22: note = Synthetic
  source 1..22: mol_type = other DNA
caatgccatcctggagttcctg

SEQ ID NO: 2010 - DNA, 22 bp, synthetic construct
  misc_feature 1..22: note = Synthetic
  source 1..22: mol_type = other DNA
tggagttcctgtaagataccaa

SEQ ID NO: 2011 - DNA, 22 bp, synthetic construct
  misc_feature 1..22: note = Synthetic
  source 1..22: mol_type = other DNA
aagaggtagggcgacagatcta

SEQ ID NO: 2012 - DNA, 22 bp, synthetic construct
  misc_feature 1..22: note = Synthetic
  source 1..22: mol_type = other DNA
gacagaaaaaagaggtagggcg

SEQ ID NO: 2013 - DNA, 22 bp, synthetic construct
  misc_feature 1..22: note = Synthetic
  source 1..22: mol_type = other DNA
agctgtcagacagaaaaaagag

SEQ ID NO: 2014 - DNA, 22 bp, synthetic construct
  misc_feature 1..22: note = Synthetic
  source 1..22: mol_type = other DNA
aaacagctgtcagacagaaaaa

SEQ ID NO: 2015 - DNA, 22 bp, synthetic construct
  misc_feature 1..22: note = Synthetic
  source 1..22: mol_type = other DNA
gcaaacagctgtcagacagaaa

SEQ ID NO: 2016 - DNA, 22 bp, synthetic construct
  misc_feature 1..22: note = Synthetic
  source 1..22: mol_type = other DNA
gaggtctgcaaacagctgtcag

SEQ ID NO: 2017 - DNA, 22 bp, synthetic construct
  misc_feature 1..22: note = Synthetic
  source 1..22: mol_type = other DNA
gcaggaggtctgcaaacagctg

SEQ ID NO: 2018 - DNA, 22 bp, synthetic construct
  misc_feature 1..22: note = Synthetic
  source 1..22: mol_type = other DNA
tgcggtggcaggaggtctgcaa

SEQ ID NO: 2019 - DNA, 22 bp, synthetic construct
  misc_feature 1..22: note = Synthetic
  source 1..22: mol_type = other DNA
gaagcctgaatctgcggtggca

SEQ ID NO: 2020 - DNA, 22 bp, synthetic construct
  misc_feature 1..22: note = Synthetic
  source 1..22: mol_type = other DNA
tgggaagcctgaatctgcggtg

SEQ ID NO: 2021 - DNA, 22 bp, synthetic construct
  misc_feature 1..22: note = Synthetic
  source 1..22: mol_type = other DNA
agtattctacaggaaaaattgg

SEQ ID NO: 2022 - DNA, 22 bp, synthetic construct
  misc_feature 1..22: note = Synthetic
  source 1..22: mol_type = other DNA
caaaaacagatgccagtattct

SEQ ID NO: 2023 - DNA, 22 bp, synthetic construct
  misc_feature 1..22: note = Synthetic
  source 1..22: mol_type = other DNA
cagcaatcctcaaaaacagatg

SEQ ID NO: 2024 - DNA, 22 bp, synthetic construct
  misc_feature 1..22: note = Synthetic
  source 1..22: mol_type = other DNA
aataattcagcaatcctcaaaa

SEQ ID NO: 2025 - DNA, 22 bp, synthetic construct
  misc_feature 1..22: note = Synthetic
  source 1..22: mol_type = other DNA
atgcaactggggaagaaataat

SEQ ID NO: 2026 - DNA, 22 bp, synthetic construct
  misc_feature 1..22: note = Synthetic
  source 1..22: mol_type = other DNA
cagaacattgaatgcaactggg

SEQ ID NO: 2027 - DNA, 22 bp, synthetic construct
  misc_feature 1..22: note = Synthetic
  source 1..22: mol_type = other DNA
attgggcagcggcaaactgttg

SEQ ID NO: 2028 - DNA, 22 bp, synthetic construct
  misc_feature 1..22: note = Synthetic
  source 1..22: mol_type = other DNA
aggaactccaggatggcattgg

SEQ ID NO: 2029 - DNA, 22 bp, synthetic construct
  misc_feature 1..22: note = Synthetic
  source 1..22: mol_type = other DNA
tttttggtatcttacaggaact

SEQ ID NO: 2030 - DNA, 22 bp, synthetic construct
  misc_feature 1..22: note = Synthetic
  source 1..22: mol_type = other DNA
tgttttgcctttttggtatctt

SEQ ID NO: 2031 - DNA, 22 bp, synthetic construct
  misc_feature 1..22: note = Synthetic
  source 1..22: mol_type = other DNA
atgatcatctcgttgatatcct

SEQ ID NO: 2032 - DNA, 22 bp, synthetic construct
  misc_feature 1..22: note = Synthetic
  source 1..22: mol_type = other DNA
ctctgtgattttataacttgat

SEQ ID NO: 2033 - DNA, 22 bp, synthetic construct
  misc_feature 1..22: note = Synthetic
  source 1..22: mol_type = other DNA
tgtgattttataacttgatcaa

SEQ ID NO: 2034 - DNA, 22 bp, synthetic construct
  misc_feature 1..22: note = Synthetic
  source 1..22: mol_type = other DNA
tgattttataacttgatcaagc

SEQ ID NO: 2035 - DNA, 22 bp, synthetic construct
  misc_feature 1..22: note = Synthetic
  source 1..22: mol_type = other DNA
tttataacttgatcaagcagag

SEQ ID NO: 2036 - DNA, 22 bp, synthetic construct
  misc_feature 1..22: note = Synthetic
  source 1..22: mol_type = other DNA
taacttgatcaagcagagaaag

SEQ ID NO: 2037 - DNA, 22 bp, synthetic construct
  misc_feature 1..22: note = Synthetic
  source 1..22: mol_type = other DNA
tcaagcagagaaagccagtcgg

SEQ ID NO: 2038 - DNA, 22 bp, synthetic construct
  misc_feature 1..22: note = Synthetic
  source 1..22: mol_type = other DNA
aagccagtcggtaagttctgtc

SEQ ID NO: 2039 - DNA, 22 bp, synthetic construct
  misc_feature 1..22: note = Synthetic
  source 1..22: mol_type = other DNA
gtccaagcccggttgaaatctg

SEQ ID NO: 2040 - DNA, 22 bp, synthetic construct
  misc_feature 1..22: note = Synthetic
  source 1..22: mol_type = other DNA
ccaagcccggttgaaatctgcc

SEQ ID NO: 2041 - DNA, 22 bp, synthetic construct
  misc_feature 1..22: note = Synthetic
  source 1..22: mol_type = other DNA
agcccggttgaaatctgccaga

SEQ ID NO: 2042 - DNA, 22 bp, synthetic construct
  misc_feature 1..22: note = Synthetic
  source 1..22: mol_type = other DNA
ccagagcaggtacctccaacat

SEQ ID NO: 2043 - DNA, 22 bp, synthetic construct
  misc_feature 1..22: note = Synthetic
  source 1..22: mol_type = other DNA
agcaggtacctccaacatcaag

SEQ ID NO: 2044 - DNA, 22 bp, synthetic construct
  misc_feature 1..22: note = Synthetic
  source 1..22: mol_type = other DNA
aacatcaaggaagatggcattt

SEQ ID NO: 2045 - DNA, 22 bp, synthetic construct
  misc_feature 1..22: note = Synthetic
  source 1..22: mol_type = other DNA
aggaagatggcatttctagttt

SEQ ID NO: 2046 - DNA, 22 bp, synthetic construct
  misc_feature 1..22: note = Synthetic
  source 1..22: mol_type = other DNA
tggcatttctagtttggagatg

SEQ ID NO: 2047 - DNA, 22 bp, synthetic construct
  misc_feature 1..22: note = Synthetic
  source 1..22: mol_type = other DNA
tagtttggagatggcagtttcc

SEQ ID NO: 2048 - DNA, 22 bp, synthetic construct
  misc_feature 1..22: note = Synthetic
  source 1..22: mol_type = other DNA
gatggcagtttccttagtaacc

SEQ ID NO: 2049 - DNA, 22 bp, synthetic construct
  misc_feature 1..22: note = Synthetic
  source 1..22: mol_type = other DNA
ttagtaaccacaggttgtgtca

SEQ ID NO: 2050 - DNA, 22 bp, synthetic construct
  misc_feature 1..22: note = Synthetic
  source 1..22: mol_type = other DNA
agtaaccacaggttgtgtcacc

SEQ ID NO: 2051 - DNA, 22 bp, synthetic construct
  misc_feature 1..22: note = Synthetic
  source 1..22: mol_type = other DNA
cacaggttgtgtcaccagagta

SEQ ID NO: 2052 - DNA, 22 bp, synthetic construct
  misc_feature 1..22: note = Synthetic
  source 1..22: mol_type = other DNA
ttgtgtcaccagagtaacagtc

SEQ ID NO: 2053 - DNA, 22 bp, synthetic construct
  misc_feature 1..22: note = Synthetic
  source 1..22: mol_type = other DNA
tgtcaccagagtaacagtctga

SEQ ID NO: 2054 - DNA, 22 bp, synthetic construct
  misc_feature 1..22: note = Synthetic
  source 1..22: mol_type = other DNA
caccagagtaacagtctgagta

SEQ ID NO: 2055 - DNA, 22 bp, synthetic construct
  misc_feature 1..22: note = Synthetic
  source 1..22: mol_type = other DNA
aaaatattttgggtttttgcaa

SEQ ID NO: 2056 - DNA, 22 bp, synthetic construct
  misc_feature 1..22: note = Synthetic
  source 1..22: mol_type = other DNA
gaaaaaatgataaaagttggca

SEQ ID NO: 2057 - DNA, 22 bp, synthetic construct
  misc_feature 1..22: note = Synthetic
  source 1..22: mol_type = other DNA
tgagaaaaaatgataaaagttg

SEQ ID NO: 2058 - DNA, 22 bp, synthetic construct
  misc_feature 1..22: note = Synthetic
  source 1..22: mol_type = other DNA
gaaggtatgagaaaaaatgata

SEQ ID NO: 2059 - DNA, 22 bp, synthetic construct
  misc_feature 1..22: note = Synthetic
  source 1..22: mol_type = other DNA
gatgatcatcaagcagaaggta

SEQ ID NO: 2060 - DNA, 22 bp, synthetic construct
  misc_feature 1..22: note = Synthetic
  source 1..22: mol_type = other DNA
tcaacgagatgatcatcaagca

SEQ ID NO: 2061 - DNA, 22 bp, synthetic construct
  misc_feature 1..22: note = Synthetic
  source 1..22: mol_type = other DNA
atatcaacgagatgatcatcaa

SEQ ID NO: 2062 - DNA, 22 bp, synthetic construct
  misc_feature 1..22: note = Synthetic
  source 1..22: mol_type = other DNA
aggatatcaacgagatgatcat

SEQ ID NO: 2063 - DNA, 22 bp, synthetic construct
  misc_feature 1..22: note = Synthetic
  source 1..22: mol_type = other DNA
tgggtgaccttgaggatatcaa

SEQ ID NO: 2064 - DNA, 22 bp, synthetic construct
  misc_feature 1..22: note = Synthetic
  source 1..22: mol_type = other DNA
agagggtgatggtgggtgacct

SEQ ID NO: 2065 - DNA, 22 bp, synthetic construct
  misc_feature 1..22: note = Synthetic
  source 1..22: mol_type = other DNA
cttgatcaagttataaaatcac

SEQ ID NO: 2066 - DNA, 22 bp, synthetic construct
  misc_feature 1..22: note = Synthetic
  source 1..22: mol_type = other DNA
tgcttgatcaagttataaaatc

SEQ ID NO: 2067 - DNA, 22 bp, synthetic construct
  misc_feature 1..22: note = Synthetic
  source 1..22: mol_type = other DNA
cgactggctttctctgcttgat

SEQ ID NO: 2068 - DNA, 22 bp, synthetic construct
  misc_feature 1..22: note = Synthetic
  source 1..22: mol_type = other DNA
ggcagatttcaaccgggcttgg

SEQ ID NO: 2069 - DNA, 22 bp, synthetic construct
  misc_feature 1..22: note = Synthetic
  source 1..22: mol_type = other DNA
gatgttggaggtacctgctctg

SEQ ID NO: 2070 - DNA, 22 bp, synthetic construct
  misc_feature 1..22: note = Synthetic
  source 1..22: mol_type = other DNA
aaatgccatcttccttgatgtt

SEQ ID NO: 2071 - DNA, 22 bp, synthetic construct
  misc_feature 1..22: note = Synthetic
  source 1..22: mol_type = other DNA
taaggaaactgccatctccaaa

SEQ ID NO: 2072 - DNA, 22 bp, synthetic construct
  misc_feature 1..22: note = Synthetic
  source 1..22: mol_type = other DNA
tggtgacacaacctgtggttac

SEQ ID NO: 2073 - DNA, 22 bp, synthetic construct
  misc_feature 1..22: note = Synthetic
  source 1..22: mol_type = other DNA
cccaaaatattttagctcctac

SEQ ID NO: 2074 - DNA, 22 bp, synthetic construct
  misc_feature 1..22: note = Synthetic
  source 1..22: mol_type = other DNA
ttttgcaaaaacccaaaatatt

SEQ ID NO: 2075 - DNA, 22 bp, synthetic construct
  misc_feature 1..22: note = Synthetic
  source 1..22: mol_type = other DNA
tcttttggattgcatctactgt

SEQ ID NO: 2076 - DNA, 22 bp, synthetic construct
  misc_feature 1..22: note = Synthetic
  source 1..22: mol_type = other DNA
tagggaccctccttccatgact

SEQ ID NO: 2077 - DNA, 22 bp, synthetic construct
  misc_feature 1..22: note = Synthetic
  source 1..22: mol_type = other DNA
caagcttggctctggcctgtcc

SEQ ID NO: 2078 - DNA, 22 bp, synthetic construct
  misc_feature 1..22: note = Synthetic
  source 1..22: mol_type = other DNA
tctggcctgtcctaagacctgc

SEQ ID NO: 2079 - DNA, 22 bp, synthetic construct
  misc_feature 1..22: note = Synthetic
  source 1..22: mol_type = other DNA
taagacctgctcagcttcttcc

SEQ ID NO: 2080 - DNA, 22 bp, synthetic construct
  misc_feature 1..22: note = Synthetic
  source 1..22: mol_type = other DNA
tgctcagcttcttccttagctt

SEQ ID NO: 2081 - DNA, 22 bp, synthetic construct
  misc_feature 1..22: note = Synthetic
  source 1..22: mol_type = other DNA
ttcaactgttgcctccggttct

SEQ ID NO: 2082 - DNA, 22 bp, synthetic construct
  misc_feature 1..22: note = Synthetic
  source 1..22: mol_type = other DNA
cactgattctgaattctttcaa

SEQ ID NO: 2083 - DNA, 22 bp, synthetic construct
  misc_feature 1..22: note = Synthetic
  source 1..22: mol_type = other DNA
ctgaattctttcaactagaata

SEQ ID NO: 2084 - DNA, 22 bp, synthetic construct
  misc_feature 1..22: note = Synthetic
  source 1..22: mol_type = other DNA
gaataaaaggaaaaataaatat

SEQ ID NO: 2085 - DNA, 22 bp, synthetic construct
  misc_feature 1..22: note = Synthetic
  source 1..22: mol_type = other DNA
taaaaggaaaaataaatatata

SEQ ID NO: 2086 - DNA, 22 bp, synthetic construct
  misc_feature 1..22: note = Synthetic
  source 1..22: mol_type = other DNA
cacagaaaccaaggttagtatc

SEQ ID NO: 2087 - DNA, 22 bp, synthetic construct
  misc_feature 1..22: note = Synthetic
  source 1..22: mol_type = other DNA
aagaaaatcacagaaaccaagg

SEQ ID NO: 2088 - DNA, 22 bp, synthetic construct
  misc_feature 1..22: note = Synthetic
  source 1..22: mol_type = other DNA
tccaaaagaaaatcacagaaac

SEQ ID NO: 2089 - DNA, 22 bp, synthetic construct
  misc_feature 1..22: note = Synthetic
  source 1..22: mol_type = other DNA
agatgcaatccaaaagaaaatc

SEQ ID NO: 2090 - DNA, 22 bp, synthetic construct
  misc_feature 1..22: note = Synthetic
  source 1..22: mol_type = other DNA
cctatacagtagatgcaatcca

SEQ ID NO: 2091 - DNA, 22 bp, synthetic construct
  misc_feature 1..22: note = Synthetic
  source 1..22: mol_type = other DNA
atggaaggagggtccctataca

SEQ ID NO: 2092 - DNA, 22 bp, synthetic construct
  misc_feature 1..22: note = Synthetic
  source 1..22: mol_type = other DNA
gtcatggaaggagggtccctat

SEQ ID NO: 2093 - DNA, 22 bp, synthetic construct
  misc_feature 1..22: note = Synthetic
  source 1..22: mol_type = other DNA
gagccaagcttgagtcatggaa

SEQ ID NO: 2094 - DNA, 22 bp, synthetic construct
  misc_feature 1..22: note = Synthetic
  source 1..22: mol_type = other DNA
ccagagccaagcttgagtcatg

SEQ ID NO: 2095 - DNA, 22 bp, synthetic construct
  misc_feature 1..22: note = Synthetic
  source 1..22: mol_type = other DNA
taggacaggccagagccaagct

SEQ ID NO: 2096 - DNA, 22 bp, synthetic construct
  misc_feature 1..22: note = Synthetic
  source 1..22: mol_type = other DNA
aggtcttaggacaggccagagc

SEQ ID NO: 2097 - DNA, 22 bp, synthetic construct
  misc_feature 1..22: note = Synthetic
  source 1..22: mol_type = other DNA
tgagcaggtcttaggacaggcc

SEQ ID NO: 2098 - DNA, 22 bp, synthetic construct
  misc_feature 1..22: note = Synthetic
  source 1..22: mol_type = other DNA
gctgagcaggtcttaggacagg

SEQ ID NO: 2099 - DNA, 22 bp, synthetic construct
  misc_feature 1..22: note = Synthetic
  source 1..22: mol_type = other DNA
aagaagctgagcaggtcttagg

SEQ ID NO: 2100 - DNA, 22 bp, synthetic construct
  misc_feature 1..22: note = Synthetic
  source 1..22: mol_type = other DNA
taaggaagaagctgagcaggtc

SEQ ID NO: 2101 - DNA, 22 bp, synthetic construct
  misc_feature 1..22: note = Synthetic
  source 1..22: mol_type = other DNA
tggaagctaaggaagaagctga

SEQ ID NO: 2102 - DNA, 22 bp, synthetic construct
  misc_feature 1..22: note = Synthetic
  source 1..22: mol_type = other DNA
ggctggaagctaaggaagaagc

SEQ ID NO: 2103 - DNA, 22 bp, synthetic construct
  misc_feature 1..22: note = Synthetic
  source 1..22: mol_type = other DNA
acaatggctggaagctaaggaa

SEQ ID NO: 2104 - DNA, 22 bp, synthetic construct
  misc_feature 1..22: note = Synthetic
  source 1..22: mol_type = other DNA
aacacaatggctggaagctaag

SEQ ID NO: 2105 - DNA, 22 bp, synthetic construct
  misc_feature 1..22: note = Synthetic
  source 1..22: mol_type = other DNA
attcaacacaatggctggaagc

SEQ ID NO: 2106 - DNA, 22 bp, synthetic construct
  misc_feature 1..22: note = Synthetic
  source 1..22: mol_type = other DNA
aaaggattcaacacaatggctg

SEQ ID NO: 2107 - DNA, 22 bp, synthetic construct
  misc_feature 1..22: note = Synthetic
  source 1..22: mol_type = other DNA
ggcaacagttgaatgaaatgtt

SEQ ID NO: 2108 - DNA, 22 bp, synthetic construct
  misc_feature 1..22: note = Synthetic
  source 1..22: mol_type = other DNA
aacaccttcagaaccggaggca

SEQ ID NO: 2109 - DNA, 22 bp, synthetic construct
  misc_feature 1..22: note = Synthetic
  source 1..22: mol_type = other DNA
gtacaagaacaccttcagaacc

SEQ ID NO: 2110 - DNA, 22 bp, synthetic construct
  misc_feature 1..22: note = Synthetic
  source 1..22: mol_type = other DNA
gggatgaagtacaagaacacct

SEQ ID NO: 2111 - DNA, 22 bp, synthetic construct
  misc_feature 1..22: note = Synthetic
  source 1..22: mol_type = other DNA
tcagaatcagtgggatgaagta

SEQ ID NO: 2112 - DNA, 22 bp, synthetic construct
  misc_feature 1..22: note = Synthetic
  source 1..22: mol_type = other DNA
aagaattcagaatcagtgggat

SEQ ID NO: 2113 - DNA, 22 bp, synthetic construct
  misc_feature 1..22: note = Synthetic
  source 1..22: mol_type = other DNA
ttctagttgaaagaattcagaa

SEQ ID NO: 2114 - DNA, 22 bp, synthetic construct
  misc_feature 1..22: note = Synthetic
  source 1..22: mol_type = other DNA
cttttattctagttgaaagaat

SEQ ID NO: 2115 - DNA, 22 bp, synthetic construct
  misc_feature 1..22: note = Synthetic
  source 1..22: mol_type = other DNA
atttttccttttattctagttg

SEQ ID NO: 2116 - DNA, 22 bp, synthetic construct
  misc_feature 1..22: note = Synthetic
  source 1..22: mol_type = other DNA
tatatttatttttccttttatt

SEQ ID NO: 2117-2999 - skipped (883 entries)

SEQ ID NO: 3000 - DNA, 20 bp, synthetic construct
  misc_feature 1..20: note = Synthetic
  source 1..20: mol_type = other DNA
aatgctgctgtcttcttgct

SEQ ID NO: 3001 - DNA, 21 bp, synthetic construct
  misc_feature 1..21: note = Synthetic
  source 1..21: mol_type = other DNA
caatgctgctgtcttcttgct

SEQ ID NO: 3002 - DNA, 20 bp, synthetic construct
  misc_feature 1..20: note = Synthetic
  source 1..20: mol_type = other DNA
aacaaaatgtacaaggaccg

SEQ ID NO: 3003 - DNA, 21 bp, synthetic construct
  misc_feature 1..21: note = Synthetic
  source 1..21: mol_type = other DNA
aacaaaatgtacaaggaccga

SEQ ID NO: 3004 - DNA, 20 bp, synthetic construct
  misc_feature 1..20: note = Synthetic
  source 1..20: mol_type = other DNA
tgcaaagtgcaacgcctgtg

SEQ ID NO: 3005 - DNA, 21 bp, synthetic construct
  misc_feature 1..21: note = Synthetic
  source 1..21: mol_type = other DNA
tgcaaagtgcaacgcctgtgg

SEQ ID NO: 3006 - DNA, 20 bp, synthetic construct
  misc_feature 1..20: note = Synthetic
  source 1..20: mol_type = other DNA
atagtctacaacaaagctca

SEQ ID NO: 3007 - DNA, 21 bp, synthetic construct
  misc_feature 1..21: note = Synthetic
  source 1..21: mol_type = other DNA
atagtctacaacaaagctcag

SEQ ID NO: 3008 - DNA, 20 bp, synthetic construct
  misc_feature 1..20: note = Synthetic
  source 1..20: mol_type = other DNA
ctgttttaaaatttttatat

SEQ ID NO: 3009 - DNA, 21 bp, synthetic construct
  misc_feature 1..21: note = Synthetic
  source 1..21: mol_type = other DNA
ctgttttaaaatttttatatt

SEQ ID NO: 3010 - DNA, 20 bp, synthetic construct
  misc_feature 1..20: note = Synthetic
  source 1..20: mol_type = other DNA
ttagcatgttcccaattctc

SEQ ID NO: 3011 - DNA, 21 bp, synthetic construct
  misc_feature 1..21: note = Synthetic
  source 1..21: mol_type = other DNA
tttagcatgttcccaattctc

SEQ ID NO: 3012 - DNA, 20 bp, synthetic construct
  misc_feature 1..20: note = Synthetic
  source 1..20: mol_type = other DNA
tcgcctgcaggtaaaagcat

SEQ ID NO: 3013 - DNA, 21 bp, synthetic construct
  misc_feature 1..21: note = Synthetic
  source 1..21: mol_type = other DNA
atcgcctgcaggtaaaagcat

SEQ ID NO: 3014 - DNA, 20 bp, synthetic construct
  misc_feature 1..20: note = Synthetic
  source 1..20: mol_type = other DNA
tctcagaaagacacaaattc

SEQ ID NO: 3015 - DNA, 21 bp, synthetic construct
  misc_feature 1..21: note = Synthetic
  source 1..21: mol_type = other DNA
tctcagaaagacacaaattcc

SEQ ID NO: 3016 - DNA, 20 bp, synthetic construct
  misc_feature 1..20: note = Synthetic
  source 1..20: mol_type = other DNA
aggcttcccaatttttcctg

SEQ ID NO: 3017 - DNA, 21 bp, synthetic construct
  misc_feature 1..21: note = Synthetic
  source 1..21: mol_type = other DNA
caggcttcccaatttttcctg

SEQ ID NO: 3018 - DNA, 20 bp, synthetic construct
  misc_feature 1..20: note = Synthetic
  source 1..20: mol_type = other DNA
gaatactggcatctgttttt

SEQ ID NO: 3019 - DNA, 21 bp, synthetic construct
  misc_feature 1..21: note = Synthetic
  source 1..21: mol_type = other DNA
agaatactggcatctgttttt

SEQ ID NO: 3020 - DNA, 20 bp, synthetic construct
  misc_feature 1..20: note = Synthetic
  source 1..20: mol_type = other DNA
gcatctgtttttgaggattg

SEQ ID NO: 3021 - DNA, 21 bp, synthetic construct
  misc_feature 1..21: note = Synthetic
  source 1..21: mol_type = other DNA
ggcatctgtttttgaggattg

SEQ ID NO: 3022 - DNA, 20 bp, synthetic construct
  misc_feature 1..20: note = Synthetic
  source 1..20: mol_type = other DNA
gccgctgcccaatgccatcc

SEQ ID NO: 3023 - DNA, 21 bp, synthetic construct
  misc_feature 1..21: note = Synthetic
  source 1..21: mol_type = other DNA
tgccgctgcccaatgccatcc

SEQ ID NO: 3024 - DNA, 20 bp, synthetic construct
  misc_feature 1..20: note = Synthetic
  source 1..20: mol_type = other DNA
gaggtagggcgacagatcta

SEQ ID NO: 3025 - DNA, 21 bp, synthetic construct
  misc_feature 1..21: note = Synthetic
  source 1..21: mol_type = other DNA
gaggtagggcgacagatctaa

SEQ ID NO: 3026 - DNA, 20 bp, synthetic construct
  misc_feature 1..20: note = Synthetic
  source 1..20: mol_type = other DNA
tctacaggaaaaattgggaa

SEQ ID NO: 3027 - DNA, 21 bp, synthetic construct
  misc_feature 1..21: note = Synthetic
  source 1..21: mol_type = other DNA
tctacaggaaaaattgggaag

SEQ ID NO: 3028 - DNA, 20 bp, synthetic construct
  misc_feature 1..20: note = Synthetic
  source 1..20: mol_type = other DNA
gcggcaaactgttgtcagaa

SEQ ID NO: 3029 - DNA, 21 bp, synthetic construct
  misc_feature 1..21: note = Synthetic
  source 1..21: mol_type = other DNA
gcggcaaactgttgtcagaac

SEQ ID NO: 3030 - DNA, 20 bp, synthetic construct
  misc_feature 1..20: note = Synthetic
  source 1..20: mol_type = other DNA
ttttggtatcttacaggaac

SEQ ID NO: 3031 - DNA, 21 bp, synthetic construct
  misc_feature 1..21: note = Synthetic
  source 1..21: mol_type = other DNA
ttttggtatcttacaggaact

SEQ ID NO: 3032 - DNA, 20 bp, synthetic construct
  misc_feature 1..20: note = Synthetic
  source 1..20: mol_type = other DNA
actattggagcctgtaagta

SEQ ID NO: 3033 - DNA, 21 bp, synthetic construct
  misc_feature 1..21: note = Synthetic
  source 1..21: mol_type = other DNA
actattggagcctgtaagtat

SEQ ID NO: 3034 - DNA, 20 bp, synthetic construct
  misc_feature 1..20: note = Synthetic
  source 1..20: mol_type = other DNA
aggaagttagaagatctgag

SEQ ID NO: 3035 - DNA, 21 bp, synthetic construct
  misc_feature 1..21: note = Synthetic
  source 1..21: mol_type = other DNA
aggaagttagaagatctgagc

SEQ ID NO: 3036 - DNA, 20 bp, synthetic construct
  misc_feature 1..20: note = Synthetic
  source 1..20: mol_type = other DNA
gtaaccacaggttgtgtcac

SEQ ID NO: 3037 - DNA, 21 bp, synthetic construct
  misc_feature 1..21: note = Synthetic
  source 1..21: mol_type = other DNA
agtaaccacaggttgtgtcac

SEQ ID NO: 3038 - DNA, 20 bp, synthetic construct
  misc_feature 1..20: note = Synthetic
  source 1..20: mol_type = other DNA
tgtgtcaccagagtaacagt

SEQ ID NO: 3039 - DNA, 21 bp, synthetic construct
  misc_feature 1..21: note = Synthetic
  source 1..21: mol_type = other DNA
ttgtgtcaccagagtaacagt

SEQ ID NO: 3040 - DNA, 20 bp, synthetic construct
  misc_feature 1..20: note = Synthetic
  source 1..20: mol_type = other DNA
tgagtaggagctaaaatatt

SEQ ID NO: 3041 - DNA, 21 bp, synthetic construct
  misc_feature 1..21: note = Synthetic
  source 1..21: mol_type = other DNA
ctgagtaggagctaaaatatt

SEQ ID NO: 3042 - DNA, 20 bp, synthetic construct
  misc_feature 1..20: note = Synthetic
  source 1..20: mol_type = other DNA
gagggtgatggtgggtgacc

SEQ ID NO: 3043 - DNA, 21 bp, synthetic construct
  misc_feature 1..21: note = Synthetic
  source 1..21: mol_type = other DNA
gagggtgatggtgggtgacct

SEQ ID NO: 3044 - DNA, 20 bp, synthetic construct
  misc_feature 1..20: note = Synthetic
  source 1..20: mol_type = other DNA
tataaaatcacagagggtga

SEQ ID NO: 3045 - DNA, 21 bp, synthetic construct
  misc_feature 1..21: note = Synthetic
  source 1..21: mol_type = other DNA
tataaaatcacagagggtgat

SEQ ID NO: 3046 - DNA, 20 bp, synthetic construct
  misc_feature 1..20: note = Synthetic
  source 1..20: mol_type = other DNA
ttgatcaagttataaaatca

SEQ ID NO: 3047 - DNA, 21 bp, synthetic construct
  misc_feature 1..21: note = Synthetic
  source 1..21: mol_type = other DNA
ttgatcaagttataaaatcac

SEQ ID NO: 3048 - DNA, 20 bp, synthetic construct
  misc_feature 1..20: note = Synthetic
  source 1..20: mol_type = other DNA
ttggtttctgtgattttctt

SEQ ID NO: 3049 - DNA, 21 bp, synthetic construct
  misc_feature 1..21: note = Synthetic
  source 1..21: mol_type = other DNA
cttggtttctgtgattttctt

SEQ ID NO: 3050 - DNA, 20 bp, synthetic construct
  misc_feature 1..20: note = Synthetic
  source 1..20: mol_type = other DNA
cttagcttccagccattgtg

SEQ ID NO: 3051 - DNA, 21 bp, synthetic construct
  misc_feature 1..21: note = Synthetic
  source 1..21: mol_type = other DNA
ccttagcttccagccattgtg

SEQ ID NO: 3052 - DNA, 20 bp, synthetic construct
  misc_feature 1..20: note = Synthetic
  source 1..20: mol_type = other DNA
tgtacttcatcccactgatt

SEQ ID NO: 3053 - DNA, 21 bp, synthetic construct
  misc_feature 1..21: note = Synthetic
  source 1..21: mol_type = other DNA
ttgtacttcatcccactgatt

SEQ ID NO: 3054 - DNA, 20 bp, synthetic construct
  misc_feature 1..20: note = Synthetic
  source 1..20: mol_type = other DNA
tgattctgaattctttcaac

SEQ ID NO: 3055 - DNA, 21 bp, synthetic construct
  misc_feature 1..21: note = Synthetic
  source 1..21: mol_type = other DNA
ctgattctgaattctttcaac

SEQ ID NO: 3056 - DNA, 20 bp, synthetic construct
  misc_feature 1..20: note = Synthetic
  source 1..20: mol_type = other DNA
agccaagcttgagtcatgga

SEQ ID NO: 3057 - DNA, 21 bp, synthetic construct
  misc_feature 1..21: note = Synthetic
  source 1..21: mol_type = other DNA
agccaagcttgagtcatggaa

SEQ ID NO: 3058 - DNA, 20 bp, synthetic construct
  misc_feature 1..20: note = Synthetic
  source 1..20: mol_type = other DNA
ttaggacaggccagagccaa

SEQ ID NO: 3059 - DNA, 21 bp, synthetic construct
  misc_feature 1..21: note = Synthetic
  source 1..21: mol_type = other DNA
ttaggacaggccagagccaag

SEQ ID NO: 3060 - DNA, 20 bp, synthetic construct
  misc_feature 1..20: note = Synthetic
  source 1..20: mol_type = other DNA
gcaacagttgaatgaaatgt

SEQ ID NO: 3061 - DNA, 21 bp, synthetic construct
  misc_feature 1..21: note = Synthetic
  source 1..21: mol_type = other DNA
gcaacagttgaatgaaatgtt

SEQ ID NO: 3062 - DNA, 20 bp, synthetic construct
  misc_feature 1..20: note = Synthetic
  source 1..20: mol_type = other DNA
ccttcagaaccggaggcaac

SEQ ID NO: 3063 - DNA, 21 bp, synthetic construct
  misc_feature 1..21: note = Synthetic
  source 1..21: mol_type = other DNA
ccttcagaaccggaggcaaca

SEQ ID NO: 3064 - DNA, 20 bp, synthetic construct
  misc_feature 1..20: note = Synthetic
  source 1..20: mol_type = other DNA
agttgaaagaattcagaatc

SEQ ID NO: 3065 - DNA, 21 bp, synthetic construct
  misc_feature 1..21: note = Synthetic
  source 1..21: mol_type = other DNA
agttgaaagaattcagaatca

SEQ ID NO: 3066 - DNA, 20 bp, synthetic construct
  misc_feature 1..20: note = Synthetic
  source 1..20: mol_type = other DNA
ttttattctagttgaaagaa

SEQ ID NO: 3067 - DNA, 21 bp, synthetic construct
  misc_feature 1..21: note = Synthetic
  source 1..21: mol_type = other DNA
ttttattctagttgaaagaat

SEQ ID NO: 3068 - DNA, 20 bp, synthetic construct
  misc_feature 1..20: note = Synthetic
  source 1..20: mol_type = other DNA
tttttccttttattctagtt

SEQ ID NO: 3069 - DNA, 21 bp, synthetic construct
  misc_feature 1..21: note = Synthetic
  source 1..21: mol_type = other DNA
tttttccttttattctagttg

SEQ ID NO: 3070-3999 - skipped (930 entries)

SEQ ID NO: 4000 - DNA, 20 bp, synthetic construct
  misc_feature 1..20: note = Synthetic
  source 1..20: mol_type = other DNA
atatgtgttacctacccttg

SEQ ID NO: 4001 - DNA, 21 bp, synthetic construct
  misc_feature 1..21: note = Synthetic
  source 1..21: mol_type = other DNA
tatatgtgttacctacccttg

SEQ ID NO: 4002 - DNA, 20 bp, synthetic construct
  misc_feature 1..20: note = Synthetic
  source 1..20: mol_type = other DNA
attttgttaactttttccca

SEQ ID NO: 4003 - DNA, 21 bp, synthetic construct
  misc_feature 1..21: note = Synthetic
  source 1..21: mol_type = other DNA
cattttgttaactttttccca

SEQ ID NO: 4004 - DNA, 20 bp, synthetic construct
  misc_feature 1..20: note = Synthetic
  source 1..20: mol_type = other DNA
ttttcccattggaaatcaag

SEQ ID NO: 4005 - DNA, 21 bp, synthetic construct
  misc_feature 1..21: note = Synthetic
  source 1..21: mol_type = other DNA
tttttcccattggaaatcaag

SEQ ID NO: 4006 - DNA, 20 bp, synthetic construct
  misc_feature 1..20: note = Synthetic
  source 1..20: mol_type = other DNA
tttcccattggaaatcaagc

SEQ ID NO: 4007 - DNA, 21 bp, synthetic construct
  misc_feature 1..21: note = Synthetic
  source 1..21: mol_type = other DNA
ttttcccattggaaatcaagc

SEQ ID NO: 4008 - DNA, 20 bp, synthetic construct
  misc_feature 1..20: note = Synthetic
  source 1..20: mol_type = other DNA
ctgtagcttcaccctttcca

SEQ ID NO: 4009 - DNA, 21 bp, synthetic construct
  misc_feature 1..21: note = Synthetic
  source 1..21: mol_type = other DNA
cctgtagcttcaccctttcca

SEQ ID NO: 4010 - DNA, 20 bp, synthetic construct
  misc_feature 1..20: note = Synthetic
  source 1..20: mol_type = other DNA
aatgtacaaggaccgacaag

SEQ ID NO: 4011 - DNA, 21 bp, synthetic construct
  misc_feature 1..21: note = Synthetic
  source 1..21: mol_type = other DNA
aatgtacaaggaccgacaagg

SEQ ID NO: 4012 - DNA, 20 bp, synthetic construct
  misc_feature 1..20: note = Synthetic
  source 1..20: mol_type = other DNA
acaaaatgtacaaggaccga

SEQ ID NO: 4013 - DNA, 21 bp, synthetic construct
  misc_feature 1..21: note = Synthetic
  source 1..21: mol_type = other DNA
acaaaatgtacaaggaccgac

SEQ ID NO: 4014 - DNA, 20 bp, synthetic construct
  misc_feature 1..20: note = Synthetic
  source 1..20: mol_type = other DNA
aacaaaatgtacaaggaccg

SEQ ID NO: 4015 - DNA, 21 bp, synthetic construct
  misc_feature 1..21: note = Synthetic
  source 1..21: mol_type = other DNA
aacaaaatgtacaaggaccga

SEQ ID NO: 4016 - DNA, 20 bp, synthetic construct
  misc_feature 1..20: note = Synthetic
  source 1..20: mol_type = other DNA
ggaaaaagttaacaaaatgt

SEQ ID NO: 4017 - DNA, 21 bp, synthetic construct
  misc_feature 1..21: note = Synthetic
  source 1..21: mol_type = other DNA
ggaaaaagttaacaaaatgta

SEQ ID NO: 4018 - DNA, 20 bp, synthetic construct
  misc_feature 1..20: note = Synthetic
  source 1..20: mol_type = other DNA
tctctcccagcttgatttcc

SEQ ID NO: 4019 - DNA, 21 bp, synthetic construct
  misc_feature 1..21: note = Synthetic
  source 1..21: mol_type = other DNA
tctctcccagcttgatttcca

SEQ ID NO: 4020 - DNA, 20 bp, synthetic construct
  misc_feature 1..20: note = Synthetic
  source 1..20: mol_type = other DNA
ctctctcccagcttgatttc

SEQ ID NO: 4021 - DNA, 21 bp, synthetic construct
  misc_feature 1..21: note = Synthetic
  source 1..21: mol_type = other DNA
ctctctcccagcttgatttcc

SEQ ID NO: 4022 - DNA, 20 bp, synthetic construct
  misc_feature 1..20: note = Synthetic
  source 1..20: mol_type = other DNA
gcctgtggaaagggtgaagc

SEQ ID NO: 4023 - DNA, 21 bp, synthetic construct
  misc_feature 1..21: note = Synthetic
  source 1..21: mol_type = other DNA
gcctgtggaaagggtgaagct

SEQ ID NO: 4024 - DNA, 20 bp, synthetic construct
  misc_feature 1..20: note = Synthetic
  source 1..20: mol_type = other DNA
gcaaagtgcaacgcctgtgg

SEQ ID NO: 4025 - DNA, 21 bp, synthetic construct
  misc_feature 1..21: note = Synthetic
  source 1..21: mol_type = other DNA
gcaaagtgcaacgcctgtgga

SEQ ID NO: 4026 - DNA, 20 bp, synthetic construct
  misc_feature 1..20: note = Synthetic
  source 1..20: mol_type = other DNA
tgcaaagtgcaacgcctgtg

SEQ ID NO: 4027 - DNA, 21 bp, synthetic construct
  misc_feature 1..21: note = Synthetic
  source 1..21: mol_type = other DNA
tgcaaagtgcaacgcctgtgg

SEQ ID NO: 4028 - DNA, 20 bp, synthetic construct
  misc_feature 1..20: note = Synthetic
  source 1..20: mol_type = other DNA
agcattgcaaagtgcaacgc

SEQ ID NO: 4029 - DNA, 21 bp, synthetic construct
  misc_feature 1..21: note = Synthetic
  source 1..21: mol_type = other DNA
agcattgcaaagtgcaacgcc

SEQ ID NO: 4030 - DNA, 20 bp, synthetic construct
  misc_feature 1..20: note = Synthetic
  source 1..20: mol_type = other DNA
atagtctacaacaaagctca

SEQ ID NO: 4031 - DNA, 21 bp, synthetic construct
  misc_feature 1..21: note = Synthetic
  source 1..21: mol_type = other DNA
atagtctacaacaaagctcag

SEQ ID NO: 4032 - DNA, 20 bp, synthetic construct
  misc_feature 1..20: note = Synthetic
  source 1..20: mol_type = other DNA
aaagatagtctacaacaaag

SEQ ID NO: 4033 - DNA, 21 bp, synthetic construct
  misc_feature 1..21: note = Synthetic
  source 1..21: mol_type = other DNA
aaagatagtctacaacaaagc

SEQ ID NO: 4034 - DNA, 20 bp, synthetic construct
  misc_feature 1..20: note = Synthetic
  source 1..20: mol_type = other DNA
tttagcatgttcccaattct

SEQ ID NO: 4035 - DNA, 21 bp, synthetic construct
  misc_feature 1..21: note = Synthetic
  source 1..21: mol_type = other DNA
atttagcatgttcccaattct

SEQ ID NO: 4036 - DNA, 20 bp, synthetic construct
  misc_feature 1..20: note = Synthetic
  source 1..20: mol_type = other DNA
cagatctgtcaaatcgcctg

SEQ ID NO: 4037 - DNA, 21 bp, synthetic construct
  misc_feature 1..21: note = Synthetic
  source 1..21: mol_type = other DNA
acagatctgtcaaatcgcctg

SEQ ID NO: 4038 - DNA, 20 bp, synthetic construct
  misc_feature 1..20: note = Synthetic
  source 1..20: mol_type = other DNA
tcgcctgcaggtaaaagcat

SEQ ID NO: 4039 - DNA, 21 bp, synthetic construct
  misc_feature 1..21: note = Synthetic
  source 1..21: mol_type = other DNA
atcgcctgcaggtaaaagcat

SEQ ID NO: 4040 - DNA, 20 bp, synthetic construct
  misc_feature 1..20: note = Synthetic
  source 1..20: mol_type = other DNA
tgctaaatacaaatggtatc

SEQ ID NO: 4041 - DNA, 21 bp, synthetic construct
  misc_feature 1..21: note = Synthetic
  source 1..21: mol_type = other DNA
tgctaaatacaaatggtatct

SEQ ID NO: 4042 - DNA, 20 bp, synthetic construct
  misc_feature 1..20: note = Synthetic
  source 1..20: mol_type = other DNA
attgggaacatgctaaatac

SEQ ID NO: 4043 - DNA, 21 bp, synthetic construct
  misc_feature 1..21: note = Synthetic
  source 1..21: mol_type = other DNA
attgggaacatgctaaataca

SEQ ID NO: 4044 - DNA, 20 bp, synthetic construct
  misc_feature 1..20: note = Synthetic
  source 1..20: mol_type = other DNA
aaagacacaaattcctgaga

SEQ ID NO: 4045 - DNA, 21 bp, synthetic construct
  misc_feature 1..21: note = Synthetic
  source 1..21: mol_type = other DNA
aaagacacaaattcctgagaa

SEQ ID NO: 4046 - DNA, 20 bp, synthetic construct
  misc_feature 1..20: note = Synthetic
  source 1..20: mol_type = other DNA
gaaagacacaaattcctgag

SEQ ID NO: 4047 - DNA, 21 bp, synthetic construct
  misc_feature 1..21: note = Synthetic
  source 1..21: mol_type = other DNA
gaaagacacaaattcctgaga

SEQ ID NO: 4048 - DNA, 20 bp, synthetic construct
  misc_feature 1..20: note = Synthetic
  source 1..20: mol_type = other DNA
atgatataaagatatttaat

SEQ ID NO: 4049 - DNA, 21 bp, synthetic construct
  misc_feature 1..21: note = Synthetic
  source 1..21: mol_type = other DNA
atgatataaagatatttaatc

SEQ ID NO: 4050 - DNA, 20 bp, synthetic construct
  misc_feature 1..20: note = Synthetic
  source 1..20: mol_type = other DNA
ttgacagatctgttgagaaa

SEQ ID NO: 4051 - DNA, 21 bp, synthetic construct
  misc_feature 1..21: note = Synthetic
  source 1..21: mol_type = other DNA
ttgacagatctgttgagaaat

SEQ ID NO: 4052 - DNA, 20 bp, synthetic construct
  misc_feature 1..20: note = Synthetic
  source 1..20: mol_type = other DNA
gatttgacagatctgttgag

SEQ ID NO: 4053 - DNA, 21 bp, synthetic construct
  misc_feature 1..21: note = Synthetic
  source 1..21: mol_type = other DNA
gatttgacagatctgttgaga

SEQ ID NO: 4054 - DNA, 20 bp, synthetic construct
  misc_feature 1..20: note = Synthetic
  source 1..20: mol_type = other DNA
ttgatccatatgcttttacc

SEQ ID NO: 4055 - DNA, 21 bp, synthetic construct
  misc_feature 1..21: note = Synthetic
  source 1..21: mol_type = other DNA
ttgatccatatgcttttacct

SEQ ID NO: 4056 - DNA, 20 bp, synthetic construct
  misc_feature 1..20: note = Synthetic
  source 1..20: mol_type = other DNA
acctcctgccaccgcagatt

SEQ ID NO: 4057 - DNA, 21 bp, synthetic construct
  misc_feature 1..21: note = Synthetic
  source 1..21: mol_type = other DNA
gacctcctgccaccgcagatt

SEQ ID NO: 4058 - DNA, 20 bp, synthetic construct
  misc_feature 1..20: note = Synthetic
  source 1..20: mol_type = other DNA
ccaatttttcctgtagaata

SEQ ID NO: 4059 - DNA, 21 bp, synthetic construct
  misc_feature 1..21: note = Synthetic
  source 1..21: mol_type = other DNA
cccaatttttcctgtagaata

SEQ ID NO: 4060 - DNA, 20 bp, synthetic construct
  misc_feature 1..20: note = Synthetic
  source 1..20: mol_type = other DNA
gaatactggcatctgttttt

SEQ ID NO: 4061 - DNA, 21 bp, synthetic construct
  misc_feature 1..21: note = Synthetic
  source 1..21: mol_type = other DNA
agaatactggcatctgttttt

SEQ ID NO: 4062 - DNA, 20 bp, synthetic construct
  misc_feature 1..20: note = Synthetic
  source 1..20: mol_type = other DNA
tgccgctgcccaatgccatc

SEQ ID NO: 4063 - DNA, 21 bp, synthetic construct
  misc_feature 1..21: note = Synthetic
  source 1..21: mol_type = other DNA
ttgccgctgcccaatgccatc

SEQ ID NO: 4064 - DNA, 20 bp, synthetic construct
  misc_feature 1..20: note = Synthetic
  source 1..20: mol_type = other DNA
agttcctgtaagataccaaa

SEQ ID NO: 4065 - DNA, 21 bp, synthetic construct
  misc_feature 1..21: note = Synthetic
  source 1..21: mol_type = other DNA
gagttcctgtaagataccaaa

SEQ ID NO: 4066 - DNA, 20 bp, synthetic construct
  misc_feature 1..20: note = Synthetic
  source 1..20: mol_type = other DNA
agaggtagggcgacagatct

SEQ ID NO: 4067 - DNA, 21 bp, synthetic construct
  misc_feature 1..21: note = Synthetic
  source 1..21: mol_type = other DNA
agaggtagggcgacagatcta

SEQ ID NO: 4068 - DNA, 20 bp, synthetic construct
  misc_feature 1..20: note = Synthetic
  source 1..20: mol_type = other DNA
ctgtcagacagaaaaaagag

SEQ ID NO: 4069 - DNA, 21 bp, synthetic construct
  misc_feature 1..21: note = Synthetic
  source 1..21: mol_type = other DNA
ctgtcagacagaaaaaagagg

SEQ ID NO: 4070 - DNA, 20 bp, synthetic construct
  misc_feature 1..20: note = Synthetic
  source 1..20: mol_type = other DNA
gctgtcagacagaaaaaaga

SEQ ID NO: 4071 - DNA, 21 bp, synthetic construct
  misc_feature 1..21: note = Synthetic
  source 1..21: mol_type = other DNA
gctgtcagacagaaaaaagag

SEQ ID NO: 4072 - DNA, 20 bp, synthetic construct
  misc_feature 1..20: note = Synthetic
  source 1..20: mol_type = other DNA
aacagctgtcagacagaaaa

SEQ ID NO: 4073 - DNA, 21 bp, synthetic construct
  misc_feature 1..21: note = Synthetic
  source 1..21: mol_type = other DNA
aacagctgtcagacagaaaaa

SEQ ID NO: 4074 - DNA, 20 bp, synthetic construct
  misc_feature 1..20: note = Synthetic
  source 1..20: mol_type = other DNA
aagcctgaatctgcggtggc

SEQ ID NO: 4075 - DNA, 21 bp, synthetic construct
  misc_feature 1..21: note = Synthetic
  source 1..21: mol_type = other DNA
aagcctgaatctgcggtggca

SEQ ID NO: 4076 - DNA, 20 bp, synthetic construct
  misc_feature 1..20: note = Synthetic
  source 1..20: mol_type = other DNA
gggaagcctgaatctgcggt

SEQ ID NO: 4077 - DNA, 21 bp, synthetic construct
  misc_feature 1..21: note = Synthetic
  source 1..21: mol_type = other DNA
gggaagcctgaatctgcggtg

SEQ ID NO: 4078 - DNA, 20 bp, synthetic construct
  misc_feature 1..20: note = Synthetic
  source 1..20: mol_type = other DNA
aattgggaagcctgaatctg

SEQ ID NO: 4079 - DNA, 21 bp, synthetic construct
  misc_feature 1..21: note = Synthetic
  source 1..21: mol_type = other DNA
aattgggaagcctgaatctgc

SEQ ID NO: 4080 - DNA, 20 bp, synthetic construct
  misc_feature 1..20: note = Synthetic
  source 1..20: mol_type = other DNA
aaaaattgggaagcctgaat

SEQ ID NO: 4081 - DNA, 21 bp, synthetic construct
  misc_feature 1..21: note = Synthetic
  source 1..21: mol_type = other DNA
aaaaattgggaagcctgaatc

SEQ ID NO: 4082 - DNA, 20 bp, synthetic construct
  misc_feature 1..20: note = Synthetic
  source 1..20: mol_type = other DNA
gccagtattctacaggaaaa

SEQ ID NO: 4083 - DNA, 21 bp, synthetic construct
  misc_feature 1..21: note = Synthetic
  source 1..21: mol_type = other DNA
gccagtattctacaggaaaaa

SEQ ID NO: 4084 - DNA, 20 bp, synthetic construct
  misc_feature 1..20: note = Synthetic
  source 1..20: mol_type = other DNA
tgccagtattctacaggaaa

SEQ ID NO: 4085 - DNA, 21 bp, synthetic construct
  misc_feature 1..21: note = Synthetic
  source 1..21: mol_type = other DNA
tgccagtattctacaggaaaa

SEQ ID NO: 4086 - DNA, 20 bp, synthetic construct
  misc_feature 1..20: note = Synthetic
  source 1..20: mol_type = other DNA
aaaaacagatgccagtattc

SEQ ID NO: 4087 - DNA, 21 bp, synthetic construct
  misc_feature 1..21: note = Synthetic
  source 1..21: mol_type = other DNA
aaaaacagatgccagtattct

SEQ ID NO: 4088 - DNA, 20 bp, synthetic construct
  misc_feature 1..20: note = Synthetic
  source 1..20: mol_type = other DNA
tgtcagaacattgaatgcaa

SEQ ID NO: 4089 - DNA, 21 bp, synthetic construct
  misc_feature 1..21: note = Synthetic
  source 1..21: mol_type = other DNA
tgtcagaacattgaatgcaac

SEQ ID NO: 4090 - DNA, 20 bp, synthetic construct
  misc_feature 1..20: note = Synthetic
  source 1..20: mol_type = other DNA
ttgtcagaacattgaatgca

SEQ ID NO: 4091 - DNA, 21 bp, synthetic construct
  misc_feature 1..21: note = Synthetic
  source 1..21: mol_type = other DNA
ttgtcagaacattgaatgcaa

SEQ ID NO: 4092 - DNA, 20 bp, synthetic construct
  misc_feature 1..20: note = Synthetic
  source 1..20: mol_type = other DNA
gttgtcagaacattgaatgc

SEQ ID NO: 4093 - DNA, 21 bp, synthetic construct
  misc_feature 1..21: note = Synthetic
  source 1..21: mol_type = other DNA
gttgtcagaacattgaatgca

SEQ ID NO: 4094 - DNA, 20 bp, synthetic construct
  misc_feature 1..20: note = Synthetic
  source 1..20: mol_type = other DNA
aactccaggatggcattggg

SEQ ID NO: 4095 - DNA, 21 bp, synthetic construct
  misc_feature 1..21: note = Synthetic
  source 1..21: mol_type = other DNA
aactccaggatggcattgggc

SEQ ID NO: 4096 - DNA, 20 bp, synthetic construct
  misc_feature 1..20: note = Synthetic
  source 1..20: mol_type = other DNA
tacaggaactccaggatggc

SEQ ID NO: 4097 - DNA, 21 bp, synthetic construct
  misc_feature 1..21: note = Synthetic
  source 1..21: mol_type = other DNA
tacaggaactccaggatggca

SEQ ID NO: 4098 - DNA, 20 bp, synthetic construct
  misc_feature 1..20: note = Synthetic
  source 1..20: mol_type = other DNA
ttacaggaactccaggatgg

SEQ ID NO: 4099 - DNA, 21 bp, synthetic construct
  misc_feature 1..21: note = Synthetic
  source 1..21: mol_type = other DNA
ttacaggaactccaggatggc

SEQ ID NO: 4100 - DNA, 20 bp, synthetic construct
  misc_feature 1..20: note = Synthetic
  source 1..20: mol_type = other DNA
ggtatcttacaggaactcca

SEQ ID NO: 4101 - DNA, 21 bp, synthetic construct
  misc_feature 1..21: note = Synthetic
  source 1..21: mol_type = other DNA
ggtatcttacaggaactccag

SEQ ID NO: 4102 - DNA, 20 bp, synthetic construct
  misc_feature 1..20: note = Synthetic
  source 1..20: mol_type = other DNA
ttttggtatcttacaggaac

SEQ ID NO: 4103 - DNA, 21 bp, synthetic construct
  misc_feature 1..21: note = Synthetic
  source 1..21: mol_type = other DNA
ttttggtatcttacaggaact

SEQ ID NO: 4104 - DNA, 20 bp, synthetic construct
  misc_feature 1..20: note = Synthetic
  source 1..20: mol_type = other DNA
gttttgcctttttggtatct

SEQ ID NO: 4105 - DNA, 21 bp, synthetic construct
  misc_feature 1..21: note = Synthetic
  source 1..21: mol_type = other DNA
gttttgcctttttggtatctt

SEQ ID NO: 4106 - DNA, 20 bp, synthetic construct
  misc_feature 1..20: note = Synthetic
  source 1..20: mol_type = other DNA
tcttttctcaaataaaaaga

SEQ ID NO: 4107 - DNA, 21 bp, synthetic construct
  misc_feature 1..21: note = Synthetic
  source 1..21: mol_type = other DNA
tcttttctcaaataaaaagac

SEQ ID NO: 4108 - DNA, 20 bp, synthetic construct
  misc_feature 1..20: note = Synthetic
  source 1..20: mol_type = other DNA
aatgggatccagtatactta

SEQ ID NO: 4109 - DNA, 21 bp, synthetic construct
  misc_feature 1..21: note = Synthetic
  source 1..21: mol_type = other DNA
gaatgggatccagtatactta

SEQ ID NO: 4110 - DNA, 20 bp, synthetic construct
  misc_feature 1..20: note = Synthetic
  source 1..20: mol_type = other DNA
tatacttacaggctccaata

SEQ ID NO: 4111 - DNA, 21 bp, synthetic construct
  misc_feature 1..21: note = Synthetic
  source 1..21: mol_type = other DNA
gtatacttacaggctccaata

SEQ ID NO: 4112 - DNA, 20 bp, synthetic construct
  misc_feature 1..20: note = Synthetic
  source 1..20: mol_type = other DNA
ggctccaatagtggtcagtc

SEQ ID NO: 4113 - DNA, 21 bp, synthetic construct
  misc_feature 1..21: note = Synthetic
  source 1..21: mol_type = other DNA
aggctccaatagtggtcagtc

SEQ ID NO: 4114 - DNA, 20 bp, synthetic construct
  misc_feature 1..20: note = Synthetic
  source 1..20: mol_type = other DNA
atagtggtcagtccaggagc

SEQ ID NO: 4115 - DNA, 21 bp, synthetic construct
  misc_feature 1..21: note = Synthetic
  source 1..21: mol_type = other DNA
aatagtggtcagtccaggagc

SEQ ID NO: 4116 - DNA, 20 bp, synthetic construct
  misc_feature 1..20: note = Synthetic
  source 1..20: mol_type = other DNA
ggtcagtccaggagctaggt

SEQ ID NO: 4117 - DNA, 21 bp, synthetic construct
  misc_feature 1..21: note = Synthetic
  source 1..21: mol_type = other DNA
tggtcagtccaggagctaggt

SEQ ID NO: 4118 - DNA, 20 bp, synthetic construct
  misc_feature 1..20: note = Synthetic
  source 1..20: mol_type = other DNA
gccctcagctcttgaagtaa

SEQ ID NO: 4119 - DNA, 21 bp, synthetic construct
  misc_feature 1..21: note = Synthetic
  source 1..21: mol_type = other DNA
tgccctcagctcttgaagtaa

SEQ ID NO: 4120 - DNA, 20 bp, synthetic construct
  misc_feature 1..20: note = Synthetic
  source 1..20: mol_type = other DNA
agtatactggatcccattct

SEQ ID NO: 4121 - DNA, 21 bp, synthetic construct
  misc_feature 1..21: note = Synthetic
  source 1..21: mol_type = other DNA
agtatactggatcccattctc

SEQ ID NO: 4122 - DNA, 20 bp, synthetic construct
  misc_feature 1..20: note = Synthetic
  source 1..20: mol_type = other DNA
actattggagcctgtaagta

SEQ ID NO: 4123 - DNA, 21 bp, synthetic construct
  misc_feature 1..21: note = Synthetic
  source 1..21: mol_type = other DNA
actattggagcctgtaagtat

SEQ ID NO: 4124 - DNA, 20 bp, synthetic construct
  misc_feature 1..20: note = Synthetic
  source 1..20: mol_type = other DNA
ctagctcctggactgaccac

SEQ ID NO: 4125 - DNA, 21 bp, synthetic construct
  misc_feature 1..21: note = Synthetic
  source 1..21: mol_type = other DNA
ctagctcctggactgaccact

SEQ ID NO: 4126 - DNA, 20 bp, synthetic construct
  misc_feature 1..20: note = Synthetic
  source 1..20: mol_type = other DNA
gcaaagcagcctgacctagc

SEQ ID NO: 4127 - DNA, 21 bp, synthetic construct
  misc_feature 1..21: note = Synthetic
  source 1..21: mol_type = other DNA
gcaaagcagcctgacctagct

SEQ ID NO: 4128 - DNA, 20 bp, synthetic construct
  misc_feature 1..20: note = Synthetic
  source 1..20: mol_type = other DNA
aaaccgtttacttcaagagc

SEQ ID NO: 4129 - DNA, 21 bp, synthetic construct
  misc_feature 1..21: note = Synthetic
  source 1..21: mol_type = other DNA
aaaccgtttacttcaagagct

SEQ ID NO: 4130 - DNA, 20 bp, synthetic construct
  misc_feature 1..20: note = Synthetic
  source 1..20: mol_type = other DNA
taaaccgtttacttcaagag

SEQ ID NO: 4131 - DNA, 21 bp, synthetic construct
  misc_feature 1..21: note = Synthetic
  source 1..21: mol_type = other DNA
taaaccgtttacttcaagagc

SEQ ID NO: 4132 - DNA, 20 bp, synthetic construct
  misc_feature 1..20: note = Synthetic
  source 1..20: mol_type = other DNA
agatctgagctctgagtgga

SEQ ID NO: 4133 - DNA, 21 bp, synthetic construct
  misc_feature 1..21: note = Synthetic
  source 1..21: mol_type = other DNA
agatctgagctctgagtggaa

SEQ ID NO: 4134 - DNA, 20 bp, synthetic construct
  misc_feature 1..20: note = Synthetic
  source 1..20: mol_type = other DNA
agaagatctgagctctgagt

SEQ ID NO: 4135 - DNA, 21 bp, synthetic construct
  misc_feature 1..21: note = Synthetic
  source 1..21: mol_type = other DNA
agaagatctgagctctgagtg

SEQ ID NO: 4136 - DNA, 20 bp, synthetic construct
  misc_feature 1..20: note = Synthetic
  source 1..20: mol_type = other DNA
agttagaagatctgagctct

SEQ ID NO: 4137 - DNA, 21 bp, synthetic construct
  misc_feature 1..21: note = Synthetic
  source 1..21: mol_type = other DNA
agttagaagatctgagctctg

SEQ ID NO: 4138 - DNA, 20 bp, synthetic construct
  misc_feature 1..20: note = Synthetic
  source 1..20: mol_type = other DNA
atgtgtatgcttttctgtta

SEQ ID NO: 4139 - DNA, 21 bp, synthetic construct
  misc_feature 1..21: note = Synthetic
  source 1..21: mol_type = other DNA
atgtgtatgcttttctgttaa

SEQ ID NO: 4140 - DNA, 20 bp, synthetic construct
  misc_feature 1..20: note = Synthetic
  source 1..20: mol_type = other DNA
atcatctcgttgatatcctc

SEQ ID NO: 4141 - DNA, 21 bp, synthetic construct
  misc_feature 1..21: note = Synthetic
  source 1..21: mol_type = other DNA
gatcatctcgttgatatcctc

SEQ ID NO: 4142 - DNA, 20 bp, synthetic construct
  misc_feature 1..20: note = Synthetic
  source 1..20: mol_type = other DNA
gatcaagcagagaaagccag

SEQ ID NO: 4143 - DNA, 21 bp, synthetic construct
  misc_feature 1..21: note = Synthetic
  source 1..21: mol_type = other DNA
tgatcaagcagagaaagccag

SEQ ID NO: 4144 - DNA, 20 bp, synthetic construct
  misc_feature 1..20: note = Synthetic
  source 1..20: mol_type = other DNA
tcggtaagttctgtccaagc

SEQ ID NO: 4145 - DNA, 21 bp, synthetic construct
  misc_feature 1..21: note = Synthetic
  source 1..21: mol_type = other DNA
gtcggtaagttctgtccaagc

SEQ ID NO: 4146 - DNA, 20 bp, synthetic construct
  misc_feature 1..20: note = Synthetic
  source 1..20: mol_type = other DNA
ccggttgaaatctgccagag

SEQ ID NO: 4147 - DNA, 21 bp, synthetic construct
  misc_feature 1..21: note = Synthetic
  source 1..21: mol_type = other DNA
cccggttgaaatctgccagag

SEQ ID NO: 4148 - DNA, 20 bp, synthetic construct
  misc_feature 1..20: note = Synthetic
  source 1..20: mol_type = other DNA
gagcaggtacctccaacatc

SEQ ID NO: 4149 - DNA, 21 bp, synthetic construct
  misc_feature 1..21: note = Synthetic
  source 1..21: mol_type = other DNA
agagcaggtacctccaacatc

SEQ ID NO: 4150 - DNA, 20 bp, synthetic construct
  misc_feature 1..20: note = Synthetic
  source 1..20: mol_type = other DNA
tacctccaacatcaaggaag

SEQ ID NO: 4151 - DNA, 21 bp, synthetic construct
  misc_feature 1..21: note = Synthetic
  source 1..21: mol_type = other DNA
gtacctccaacatcaaggaag

SEQ ID NO: 4152 - DNA, 20 bp, synthetic construct
  misc_feature 1..20: note = Synthetic
  source 1..20: mol_type = other DNA
aggaagatggcatttctagt

SEQ ID NO: 4153 - DNA, 21 bp, synthetic construct
  misc_feature 1..21: note = Synthetic
  source 1..21: mol_type = other DNA
aaggaagatggcatttctagt

SEQ ID NO: 4154 - DNA, 20 bp, synthetic construct
  misc_feature 1..20: note = Synthetic
  source 1..20: mol_type = other DNA
atggcatttctagtttggag

SEQ ID NO: 4155 - DNA, 21 bp, synthetic construct
  misc_feature 1..21: note = Synthetic
  source 1..21: mol_type = other DNA
gatggcatttctagtttggag

SEQ ID NO: 4156 - DNA, 20 bp, synthetic construct
  misc_feature 1..20: note = Synthetic
  source 1..20: mol_type = other DNA
ggcagtttccttagtaacca

SEQ ID NO: 4157 - DNA, 21 bp, synthetic construct
  misc_feature 1..21: note = Synthetic
  source 1..21: mol_type = other DNA
tggcagtttccttagtaacca

SEQ ID NO: 4158 - DNA, 20 bp, synthetic construct
  misc_feature 1..20: note = Synthetic
  source 1..20: mol_type = other DNA
caccagagtaacagtctgag

SEQ ID NO: 4159 - DNA, 21 bp, synthetic construct
  misc_feature 1..21: note = Synthetic
  source 1..21: mol_type = other DNA
tcaccagagtaacagtctgag

SEQ ID NO: 4160 - DNA, 20 bp, synthetic construct
  misc_feature 1..20: note = Synthetic
  source 1..20: mol_type = other DNA
tgagtaggagctaaaatatt

SEQ ID NO: 4161 - DNA, 21 bp, synthetic construct
  misc_feature 1..21: note = Synthetic
  source 1..21: mol_type = other DNA
ctgagtaggagctaaaatatt

SEQ ID NO: 4162 - DNA, 20 bp, synthetic construct
  misc_feature 1..20: note = Synthetic
  source 1..20: mol_type = other DNA
gagtaggagctaaaatattt

SEQ ID NO: 4163 - DNA, 21 bp, synthetic construct
  misc_feature 1..21: note = Synthetic
  source 1..21: mol_type = other DNA
tgagtaggagctaaaatattt

SEQ ID NO: 4164 - DNA, 20 bp, synthetic construct
  misc_feature 1..20: note = Synthetic
  source 1..20: mol_type = other DNA
atattttgggtttttgcaaa

SEQ ID NO: 4165 - DNA, 21 bp, synthetic construct
  misc_feature 1..21: note = Synthetic
  source 1..21: mol_type = other DNA
aatattttgggtttttgcaaa

SEQ ID NO: 4166 - DNA, 20 bp, synthetic construct
  misc_feature 1..20: note = Synthetic
  source 1..20: mol_type = other DNA
gtatgagaaaaaatgataaa

SEQ ID NO: 4167 - DNA, 21 bp, synthetic construct
  misc_feature 1..21: note = Synthetic
  source 1..21: mol_type = other DNA
gtatgagaaaaaatgataaaa

SEQ ID NO: 4168 - DNA, 20 bp, synthetic construct
  misc_feature 1..20: note = Synthetic
  source 1..20: mol_type = other DNA
caacgagatgatcatcaagc

SEQ ID NO: 4169 - DNA, 21 bp, synthetic construct
  misc_feature 1..21: note = Synthetic
  source 1..21: mol_type = other DNA
caacgagatgatcatcaagca

SEQ ID NO: 4170 - DNA, 20 bp, synthetic construct
  misc_feature 1..20: note = Synthetic
  source 1..20: mol_type = other DNA
gagggtgatggtgggtgacc

SEQ ID NO: 4171 - DNA, 21 bp, synthetic construct
  misc_feature 1..21: note = Synthetic
  source 1..21: mol_type = other DNA
gagggtgatggtgggtgacct

SEQ ID NO: 4172 - DNA, 20 bp, synthetic construct
  misc_feature 1..20: note = Synthetic
  source 1..20: mol_type = other DNA
ataaaatcacagagggtgat

SEQ ID NO: 4173 - DNA, 21 bp, synthetic construct
  misc_feature 1..21: note = Synthetic
  source 1..21: mol_type = other DNA
ataaaatcacagagggtgatg

SEQ ID NO: 4174 - DNA, 20 bp, synthetic construct
  misc_feature 1..20: note = Synthetic
  source 1..20: mol_type = other DNA
tataaaatcacagagggtga

SEQ ID NO: 4175 - DNA, 21 bp, synthetic construct
  misc_feature 1..21: note = Synthetic
  source 1..21: mol_type = other DNA
tataaaatcacagagggtgat

SEQ ID NO: 4176 - DNA, 20 bp, synthetic construct
  misc_feature 1..20: note = Synthetic
  source 1..20: mol_type = other DNA
agttataaaatcacagaggg

SEQ ID NO: 4177 - DNA, 21 bp, synthetic construct
  misc_feature 1..21: note = Synthetic
  source 1..21: mol_type = other DNA
agttataaaatcacagagggt

SEQ ID NO: 4178 - DNA, 20 bp, synthetic construct
  misc_feature 1..20: note = Synthetic
  source 1..20: mol_type = other DNA
tgatcaagttataaaatcac

SEQ ID NO: 4179 - DNA, 21 bp, synthetic construct
  misc_feature 1..21: note = Synthetic
  source 1..21: mol_type = other DNA
tgatcaagttataaaatcaca

SEQ ID NO: 4180 - DNA, 20 bp, synthetic construct
  misc_feature 1..20: note = Synthetic
  source 1..20: mol_type = other DNA
ttgatcaagttataaaatca

SEQ ID NO: 4181 - DNA, 21 bp, synthetic construct
  misc_feature 1..21: note = Synthetic
  source 1..21: mol_type = other DNA
ttgatcaagttataaaatcac

SEQ ID NO: 4182 - DNA, 20 bp, synthetic construct
  misc_feature 1..20: note = Synthetic
  source 1..20: mol_type = other DNA
gggcttggacagaacttacc

SEQ ID NO: 4183 - DNA, 21 bp, synthetic construct
  misc_feature 1..21: note = Synthetic
  source 1..21: mol_type = other DNA
gggcttggacagaacttaccg

SEQ ID NO: 4184 - DNA, 20 bp, synthetic construct
  misc_feature 1..20: note = Synthetic
  source 1..20: mol_type = other DNA
ctctggcagatttcaaccgg

SEQ ID NO: 4185 - DNA, 21 bp, synthetic construct
  misc_feature 1..21: note = Synthetic
  source 1..21: mol_type = other DNA
ctctggcagatttcaaccggg

SEQ ID NO: 4186 - DNA, 20 bp, synthetic construct
  misc_feature 1..20: note = Synthetic
  source 1..20: mol_type = other DNA
acctgctctggcagatttca

SEQ ID NO: 4187 - DNA, 21 bp, synthetic construct
  misc_feature 1..21: note = Synthetic
  source 1..21: mol_type = other DNA
acctgctctggcagatttcaa

SEQ ID NO: 4188 - DNA, 20 bp, synthetic construct
  misc_feature 1..20: note = Synthetic
  source 1..20: mol_type = other DNA
tacctgctctggcagatttc

SEQ ID NO: 4189 - DNA, 21 bp, synthetic construct
  misc_feature 1..21: note = Synthetic
  source 1..21: mol_type = other DNA
tacctgctctggcagatttca

SEQ ID NO: 4190 - DNA, 20 bp, synthetic construct
  misc_feature 1..20: note = Synthetic
  source 1..20: mol_type = other DNA
cttgatgttggaggtacctg

SEQ ID NO: 4191 - DNA, 21 bp, synthetic construct
  misc_feature 1..21: note = Synthetic
  source 1..21: mol_type = other DNA
cttgatgttggaggtacctgc

SEQ ID NO: 4192 - DNA, 20 bp, synthetic construct
  misc_feature 1..20: note = Synthetic
  source 1..20: mol_type = other DNA
aatgccatcttccttgatgt

SEQ ID NO: 4193 - DNA, 21 bp, synthetic construct
  misc_feature 1..21: note = Synthetic
  source 1..21: mol_type = other DNA
aatgccatcttccttgatgtt

SEQ ID NO: 4194 - DNA, 20 bp, synthetic construct
  misc_feature 1..20: note = Synthetic
  source 1..20: mol_type = other DNA
agaaatgccatcttccttga

SEQ ID NO: 4195 - DNA, 21 bp, synthetic construct
  misc_feature 1..21: note = Synthetic
  source 1..21: mol_type = other DNA
agaaatgccatcttccttgat

SEQ ID NO: 4196 - DNA, 20 bp, synthetic construct
  misc_feature 1..20: note = Synthetic
  source 1..20: mol_type = other DNA
ggtgacacaacctgtggtta

SEQ ID NO: 4197 - DNA, 21 bp, synthetic construct
  misc_feature 1..21: note = Synthetic
  source 1..21: mol_type = other DNA
ggtgacacaacctgtggttac

SEQ ID NO: 4198 - DNA, 20 bp, synthetic construct
  misc_feature 1..20: note = Synthetic
  source 1..20: mol_type = other DNA
tgttactctggtgacacaac

SEQ ID NO: 4199 - DNA, 21 bp, synthetic construct
  misc_feature 1..21: note = Synthetic
  source 1..21: mol_type = other DNA
tgttactctggtgacacaacc

SEQ ID NO: 4200 - DNA, 20 bp, synthetic construct
  misc_feature 1..20: note = Synthetic
  source 1..20: mol_type = other DNA
agctcctactcagactgtta

SEQ ID NO: 4201 - DNA, 21 bp, synthetic construct
  misc_feature 1..21: note = Synthetic
  source 1..21: mol_type = other DNA
agctcctactcagactgttac

SEQ ID NO: 4202 - DNA, 20 bp, synthetic construct
  misc_feature 1..20: note = Synthetic
  source 1..20: mol_type = other DNA
aggtatctttgatactaacc

SEQ ID NO: 4203 - DNA, 21 bp, synthetic construct
  misc_feature 1..21: note = Synthetic
  source 1..21: mol_type = other DNA
aaggtatctttgatactaacc

SEQ ID NO: 4204 - DNA, 20 bp, synthetic construct
  misc_feature 1..20: note = Synthetic
  source 1..20: mol_type = other DNA
ttggtttctgtgattttctt

SEQ ID NO: 4205 - DNA, 21 bp, synthetic construct
  misc_feature 1..21: note = Synthetic
  source 1..21: mol_type = other DNA
cttggtttctgtgattttctt

SEQ ID NO: 4206 - DNA, 20 bp, synthetic construct
  misc_feature 1..20: note = Synthetic
  source 1..20: mol_type = other DNA
tttggattgcatctactgta

SEQ ID NO: 4207 - DNA, 21 bp, synthetic construct
  misc_feature 1..21: note = Synthetic
  source 1..21: mol_type = other DNA
ttttggattgcatctactgta

SEQ ID NO: 4208 - DNA, 20 bp, synthetic construct
  misc_feature 1..20: note = Synthetic
  source 1..20: mol_type = other DNA
ttggattgcatctactgtat

SEQ ID NO: 4209 - DNA, 21 bp, synthetic construct
  misc_feature 1..21: note = Synthetic
  source 1..21: mol_type = other DNA
tttggattgcatctactgtat

SEQ ID NO: 4210 - DNA, 20 bp, synthetic construct
  misc_feature 1..20: note = Synthetic
  source 1..20: mol_type = other DNA
cctccttccatgactcaagc

SEQ ID NO: 4211 - DNA, 21 bp, synthetic construct
  misc_feature 1..21: note = Synthetic
  source 1..21: mol_type = other DNA
ccctccttccatgactcaagc

SEQ ID NO: 4212 - DNA, 20 bp, synthetic construct
  misc_feature 1..20: note = Synthetic
  source 1..20: mol_type = other DNA
tccatgactcaagcttggct

SEQ ID NO: 4213 - DNA, 21 bp, synthetic construct
  misc_feature 1..21: note = Synthetic
  source 1..21: mol_type = other DNA
ttccatgactcaagcttggct

SEQ ID NO: 4214 - DNA, 20 bp, synthetic construct
  misc_feature 1..20: note = Synthetic
  source 1..20: mol_type = other DNA
atttcattcaactgttgcct

SEQ ID NO: 4215 - DNA, 21 bp, synthetic construct
  misc_feature 1..21: note = Synthetic
  source 1..21: mol_type = other DNA
catttcattcaactgttgcct

SEQ ID NO: 4216 - DNA, 20 bp, synthetic construct
  misc_feature 1..20: note = Synthetic
  source 1..20: mol_type = other DNA
aactgttgcctccggttctg

SEQ ID NO: 4217 - DNA, 21 bp, synthetic construct
  misc_feature 1..21: note = Synthetic
  source 1..21: mol_type = other DNA
caactgttgcctccggttctg

SEQ ID NO: 4218 - DNA, 20 bp, synthetic construct
  misc_feature 1..20: note = Synthetic
  source 1..20: mol_type = other DNA
aattctttcaactagaataa

SEQ ID NO: 4219 - DNA, 21 bp, synthetic construct
  misc_feature 1..21: note = Synthetic
  source 1..21: mol_type = other DNA
gaattctttcaactagaataa

SEQ ID NO: 4220 - DNA, 20 bp, synthetic construct
  misc_feature 1..20: note = Synthetic
  source 1..20: mol_type = other DNA
ccaaaagaaaatcacagaaa

SEQ ID NO: 4221 - DNA, 21 bp, synthetic construct
  misc_feature 1..21: note = Synthetic
  source 1..21: mol_type = other DNA
ccaaaagaaaatcacagaaac

SEQ ID NO: 4222 - DNA, 20 bp, synthetic construct
  misc_feature 1..20: note = Synthetic
  source 1..20: mol_type = other DNA
gccaagcttgagtcatggaa

SEQ ID NO: 4223 - DNA, 21 bp, synthetic construct
  misc_feature 1..21: note = Synthetic
  source 1..21: mol_type = other DNA
gccaagcttgagtcatggaag

SEQ ID NO: 4224 - DNA, 20 bp, synthetic construct
  misc_feature 1..20: note = Synthetic
  source 1..20: mol_type = other DNA
agccaagcttgagtcatgga

SEQ ID NO: 4225 - DNA, 21 bp, synthetic construct
  misc_feature 1..21: note = Synthetic
  source 1..21: mol_type = other DNA
agccaagcttgagtcatggaa

SEQ ID NO: 4226 - DNA, 20 bp, synthetic construct
  misc_feature 1..20: note = Synthetic
  source 1..20: mol_type = other DNA
cagagccaagcttgagtcat

SEQ ID NO: 4227 - DNA, 21 bp, synthetic construct
  misc_feature 1..21: note = Synthetic
  source 1..21: mol_type = other DNA
cagagccaagcttgagtcatg

SEQ ID NO: 4228 - DNA, 20 bp, synthetic construct
  misc_feature 1..20: note = Synthetic
  source 1..20: mol_type = other DNA
aggccagagccaagcttgag

SEQ ID NO: 4229 - DNA, 21 bp, synthetic construct
  misc_feature 1..21: note = Synthetic
  source 1..21: mol_type = other DNA
aggccagagccaagcttgagt

SEQ ID NO: 4230 - DNA, 20 bp, synthetic construct
  misc_feature 1..20: note = Synthetic
  source 1..20: mol_type = other DNA
agaagctgagcaggtcttag

SEQ ID NO: 4231 - DNA, 21 bp, synthetic construct
  misc_feature 1..21: note = Synthetic
  source 1..21: mol_type = other DNA
agaagctgagcaggtcttagg

SEQ ID NO: 4232 - DNA, 20 bp, synthetic construct
  misc_feature 1..20: note = Synthetic
  source 1..20: mol_type = other DNA
aaggaagaagctgagcaggt

SEQ ID NO: 4233 - DNA, 21 bp, synthetic construct
  misc_feature 1..21: note = Synthetic
  source 1..21: mol_type = other DNA
aaggaagaagctgagcaggtc

SEQ ID NO: 4234 - DNA, 20 bp, synthetic construct
  misc_feature 1..20: note = Synthetic
  source 1..20: mol_type = other DNA
ggaagctaaggaagaagctg

SEQ ID NO: 4235 - DNA, 21 bp, synthetic construct
  misc_feature 1..21: note = Synthetic
  source 1..21: mol_type = other DNA
ggaagctaaggaagaagctga

SEQ ID NO: 4236 - DNA, 20 bp, synthetic construct
  misc_feature 1..20: note = Synthetic
  source 1..20: mol_type = other DNA
ttcaacacaatggctggaag

SEQ ID NO: 4237 - DNA, 21 bp, synthetic construct
  misc_feature 1..21: note = Synthetic
  source 1..21: mol_type = other DNA
ttcaacacaatggctggaagc

SEQ ID NO: 4238 - DNA, 20 bp, synthetic construct
  misc_feature 1..20: note = Synthetic
  source 1..20: mol_type = other DNA
gttaaaggattcaacacaat

SEQ ID NO: 4239 - DNA, 21 bp, synthetic construct
  misc_feature 1..21: note = Synthetic
  source 1..21: mol_type = other DNA
gttaaaggattcaacacaatg

SEQ ID NO: 4240 - DNA, 20 bp, synthetic construct
  misc_feature 1..20: note = Synthetic
  source 1..20: mol_type = other DNA
aaatgttaaaggattcaaca

SEQ ID NO: 4241 - DNA, 21 bp, synthetic construct
  misc_feature 1..21: note = Synthetic
  source 1..21: mol_type = other DNA
aaatgttaaaggattcaacac

SEQ ID NO: 4242 - DNA, 20 bp, synthetic construct
  misc_feature 1..20: note = Synthetic
  source 1..20: mol_type = other DNA
gcaacagttgaatgaaatgt

SEQ ID NO: 4243 - DNA, 21 bp, synthetic construct
  misc_feature 1..21: note = Synthetic
  source 1..21: mol_type = other DNA
gcaacagttgaatgaaatgtt

SEQ ID NO: 4244 - DNA, 20 bp, synthetic construct
  misc_feature 1..20: note = Synthetic
  source 1..20: mol_type = other DNA
tacaagaacaccttcagaac

SEQ ID NO: 4245 - DNA, 21 bp, synthetic construct
  misc_feature 1..21: note = Synthetic
  source 1..21: mol_type = other DNA
tacaagaacaccttcagaacc

SEQ ID NO: 4246 - DNA, 20 bp, synthetic construct
  misc_feature 1..20: note = Synthetic
  source 1..20: mol_type = other DNA
aagtacaagaacaccttcag

SEQ ID NO: 4247 - DNA, 21 bp, synthetic construct
  misc_feature 1..21: note = Synthetic
  source 1..21: mol_type = other DNA
aagtacaagaacaccttcaga

SEQ ID NO: 4248 - DNA, 20 bp, synthetic construct
  misc_feature 1..20: note = Synthetic
  source 1..20: mol_type = other DNA
agttgaaagaattcagaatc

SEQ ID NO: 4249 - DNA, 21 bp, synthetic construct
  misc_feature 1..21: note = Synthetic
  source 1..21: mol_type = other DNA
agttgaaagaattcagaatca

SEQ ID NO: 4250 - DNA, 20 bp, synthetic construct
  misc_feature 1..20: note = Synthetic
  source 1..20: mol_type = other DNA
tagttgaaagaattcagaat

SEQ ID NO: 4251 - DNA, 21 bp, synthetic construct
  misc_feature 1..21: note = Synthetic
  source 1..21: mol_type = other DNA
tagttgaaagaattcagaatc

SEQ ID NO: 4252-4299 - skipped (48 entries)

SEQ ID NO: 4300 - RNA, 20 nt, synthetic construct
  misc_feature 1..20: note = Synthetic
  source 1..20: mol_type = other RNA
cctccaaaggcgttagcasa

SEQ ID NO: 4301 - RNA, 20 nt, synthetic construct
  misc_feature 1..20: note = Synthetic
  source 1..20: mol_type = other RNA
ggagtgcaagaccaacgasa

SEQ ID NO: 4302 - RNA, 20 nt, synthetic construct
  misc_feature 1..20: note = Synthetic
  source 1..20: mol_type = other RNA
acaatagaatctactggtsa

SEQ ID NO: 4303 - RNA, 20 nt, synthetic construct
  misc_feature 1..20: note = Synthetic
  source 1..20: mol_type = other RNA
ctaacttgtcctacgacasa

SEQ ID NO: 4304 - RNA, 20 nt, synthetic construct
  misc_feature 1..20: note = Synthetic
  source 1..20: mol_type = other RNA
gcggtagactggatccacsa

SEQ ID NO: 4305 - RNA, 20 nt, synthetic construct
  misc_feature 1..20: note = Synthetic
  source 1..20: mol_type = other RNA
ctgacaccaagggcgtaasa

SEQ ID NO: 4306 - RNA, 20 nt, synthetic construct
  misc_feature 1..20: note = Synthetic
  source 1..20: mol_type = other RNA
gacccagagccatcgtagsa

SEQ ID NO: 4307 - RNA, 20 nt, synthetic construct
  misc_feature 1..20: note = Synthetic
  source 1..20: mol_type = other RNA
ggaactggcggctgaagasa

SEQ ID NO: 4308 - RNA, 20 nt, synthetic construct
  misc_feature 1..20: note = Synthetic
  source 1..20: mol_type = other RNA
ctcgtgacattcggtactsa

SEQ ID NO: 4309 - RNA, 20 nt, synthetic construct
  misc_feature 1..20: note = Synthetic
  source 1..20: mol_type = other RNA
ggatacacgcatggtttcsa

SEQ ID NO: 4310 - RNA, 21 nt, synthetic construct
  misc_feature 1..21: note = Synthetic
  source 1..21: mol_type = other RNA
aaaaaatccccactatctgta

SEQ ID NO: 4311 - RNA, 21 nt, synthetic construct
  misc_feature 1..21: note = Synthetic
  source 1..21: mol_type = other RNA
aaaaaccttctatacagtggt

SEQ ID NO: 4312 - RNA, 21 nt, synthetic construct
  misc_feature 1..21: note = Synthetic
  source 1..21: mol_type = other RNA
aaaaagcgttgcacacagtcc

SEQ ID NO: 4313 - RNA, 21 nt, synthetic construct
  misc_feature 1..21: note = Synthetic
  source 1..21: mol_type = other RNA
aaaaagtgacacccatctccc

SEQ ID NO: 4314 - RNA, 21 nt, synthetic construct
  misc_feature 1..21: note = Synthetic
  source 1..21: mol_type = other RNA
aaaaataaatagattttatat

SEQ ID NO: 4315 - RNA, 21 nt, synthetic construct
  misc_feature 1..21: note = Synthetic
  source 1..21: mol_type = other RNA
aaaaatccccactatctgtac

SEQ ID NO: 4316 - RNA, 21 nt, synthetic construct
  misc_feature 1..21: note = Synthetic
  source 1..21: mol_type = other RNA
aaaacaaagctctggcaggca

SEQ ID NO: 4317 - RNA, 21 nt, synthetic construct
  misc_feature 1..21: note = Synthetic
  source 1..21: mol_type = other RNA
aaaacaaggccggcgaggtct

SEQ ID NO: 4318 - RNA, 21 nt, synthetic construct
  misc_feature 1..21: note = Synthetic
  source 1..21: mol_type = other RNA
aaaacagtgcaaaataataac

SEQ ID NO: 4319 - RNA, 21 nt, synthetic construct
  misc_feature 1..21: note = Synthetic
  source 1..21: mol_type = other RNA
aaaaccttctatacagtggtt

SEQ ID NO: 4320 - RNA, 21 nt, synthetic construct
  misc_feature 1..21: note = Synthetic
  source 1..21: mol_type = other RNA
aaaacttcctggagagaaatg

SEQ ID NO: 4321 - RNA, 21 nt, synthetic construct
  misc_feature 1..21: note = Synthetic
  source 1..21: mol_type = other RNA
aaaagcgttgcacacagtcca

SEQ ID NO: 4322 - RNA, 21 nt, synthetic construct
  misc_feature 1..21: note = Synthetic
  source 1..21: mol_type = other RNA
aaaagtgacacccatctccca

SEQ ID NO: 4323 - RNA, 21 nt, synthetic construct
  misc_feature 1..21: note = Synthetic
  source 1..21: mol_type = other RNA
aaaataaatagattttatata

SEQ ID NO: 4324 - RNA, 21 nt, synthetic construct
  misc_feature 1..21: note = Synthetic
  source 1..21: mol_type = other RNA
aaaataataacacaaatgcca

SEQ ID NO: 4325 - RNA, 21 nt, synthetic construct
  misc_feature 1..21: note = Synthetic
  source 1..21: mol_type = other RNA
aaaatactttgtcctcaaaga

SEQ ID NO: 4326 - RNA, 21 nt, synthetic construct
  misc_feature 1..21: note = Synthetic
  source 1..21: mol_type = other RNA
aaaatcccaacccaagccatt

SEQ ID NO: 4327 - RNA, 21 nt, synthetic construct
  misc_feature 1..21: note = Synthetic
  source 1..21: mol_type = other RNA
aaaatccccactatctgtaca

SEQ ID NO: 4328 - RNA, 21 nt, synthetic construct
  misc_feature 1..21: note = Synthetic
  source 1..21: mol_type = other RNA
aaaatggcttcgttgatgata

SEQ ID NO: 4329 - RNA, 21 nt, synthetic construct
  misc_feature 1..21: note = Synthetic
  source 1..21: mol_type = other RNA
aaacaaagctctggcaggcaa

SEQ ID NO: 4330 - RNA, 21 nt, synthetic construct
  misc_feature 1..21: note = Synthetic
  source 1..21: mol_type = other RNA
aaacaaggccggcgaggtctc

SEQ ID NO: 4331 - RNA, 21 nt, synthetic construct
  misc_feature 1..21: note = Synthetic
  source 1..21: mol_type = other RNA
aaacacatacccatcaacgac

SEQ ID NO: 4332 - RNA, 21 nt, synthetic construct
  misc_feature 1..21: note = Synthetic
  source 1..21: mol_type = other RNA
aaacacgttgactcctgagtt

SEQ ID NO: 4333 - RNA, 21 nt, synthetic construct
  misc_feature 1..21: note = Synthetic
  source 1..21: mol_type = other RNA
aaacagtgcaaaataataaca

SEQ ID NO: 4334 - RNA, 21 nt, synthetic construct
  misc_feature 1..21: note = Synthetic
  source 1..21: mol_type = other RNA
aaacataacaaaaaatcccca

SEQ ID NO: 4335 - RNA, 21 nt, synthetic construct
  misc_feature 1..21: note = Synthetic
  source 1..21: mol_type = other RNA
aaaccaaaatcccaacccaag

SEQ ID NO: 4336 - RNA, 21 nt, synthetic construct
  misc_feature 1..21: note = Synthetic
  source 1..21: mol_type = other RNA
aaaccagaaaggcttatcacg

SEQ ID NO: 4337 - RNA, 21 nt, synthetic construct
  misc_feature 1..21: note = Synthetic
  source 1..21: mol_type = other RNA
aaaccatcctcccacctcagc

SEQ ID NO: 4338 - RNA, 21 nt, synthetic construct
  misc_feature 1..21: note = Synthetic
  source 1..21: mol_type = other RNA
aaacccacctcgaaagacact

SEQ ID NO: 4339 - RNA, 21 nt, synthetic construct
  misc_feature 1..21: note = Synthetic
  source 1..21: mol_type = other RNA
aaaccctggcttcccgcgatt

SEQ ID NO: 4340 - RNA, 21 nt, synthetic construct
  misc_feature 1..21: note = Synthetic
  source 1..21: mol_type = other RNA
aaaccggggacttcgccagga

SEQ ID NO: 4341 - RNA, 21 nt, synthetic construct
  misc_feature 1..21: note = Synthetic
  source 1..21: mol_type = other RNA
aaaccttctatacagtggttt

SEQ ID NO: 4342 - RNA, 21 nt, synthetic construct
  misc_feature 1..21: note = Synthetic
  source 1..21: mol_type = other RNA
aaacgatccagactggaggat

SEQ ID NO: 4343 - RNA, 21 nt, synthetic construct
  misc_feature 1..21: note = Synthetic
  source 1..21: mol_type = other RNA
aaactcaaaacttcctggaga

SEQ ID NO: 4344 - RNA, 21 nt, synthetic construct
  misc_feature 1..21: note = Synthetic
  source 1..21: mol_type = other RNA
aaactcgtcctgggagcacgt

SEQ ID NO: 4345 - RNA, 21 nt, synthetic construct
  misc_feature 1..21: note = Synthetic
  source 1..21: mol_type = other RNA
aaacttcctggagagaaatgg

SEQ ID NO: 4346 - RNA, 21 nt, synthetic construct
  misc_feature 1..21: note = Synthetic
  source 1..21: mol_type = other RNA
aaacttgggcgagtgggggtt

SEQ ID NO: 4347 - RNA, 21 nt, synthetic construct
  misc_feature 1..21: note = Synthetic
  source 1..21: mol_type = other RNA
aaagaacctgaagtcccgtca

SEQ ID NO: 4348 - RNA, 21 nt, synthetic construct
  misc_feature 1..21: note = Synthetic
  source 1..21: mol_type = other RNA
aaagaagaggcatttcagagg

SEQ ID NO: 4349 - RNA, 21 nt, synthetic construct
  misc_feature 1..21: note = Synthetic
  source 1..21: mol_type = other RNA
aaagacactgggtgggtcatg

SEQ ID NO: 4350 - RNA, 21 nt, synthetic construct
  misc_feature 1..21: note = Synthetic
  source 1..21: mol_type = other RNA
aaagacccctacagcgctgcg

SEQ ID NO: 4351 - RNA, 21 nt, synthetic construct
  misc_feature 1..21: note = Synthetic
  source 1..21: mol_type = other RNA
aaagacgacaatggcagttct

SEQ ID NO: 4352 - RNA, 21 nt, synthetic construct
  misc_feature 1..21: note = Synthetic
  source 1..21: mol_type = other RNA
aaagacggccaaggagaaggg

SEQ ID NO: 4353 - RNA, 21 nt, synthetic construct
  misc_feature 1..21: note = Synthetic
  source 1..21: mol_type = other RNA
aaagcagtggcataatcatag

SEQ ID NO: 4354 - RNA, 21 nt, synthetic construct
  misc_feature 1..21: note = Synthetic
  source 1..21: mol_type = other RNA
aaagccacttgcttctctggg

SEQ ID NO: 4355 - RNA, 21 nt, synthetic construct
  misc_feature 1..21: note = Synthetic
  source 1..21: mol_type = other RNA
aaagcgttgcacacagtccag

SEQ ID NO: 4356 - RNA, 21 nt, synthetic construct
  misc_feature 1..21: note = Synthetic
  source 1..21: mol_type = other RNA
aaagctctggcaggcaatgct

SEQ ID NO: 4357 - RNA, 21 nt, synthetic construct
  misc_feature 1..21: note = Synthetic
  source 1..21: mol_type = other RNA
aaaggaagaaaccaaaatccc

SEQ ID NO: 4358 - RNA, 21 nt, synthetic construct
  misc_feature 1..21: note = Synthetic
  source 1..21: mol_type = other RNA
aaaggaagacgaggagcacga

SEQ ID NO: 4359 - RNA, 21 nt, synthetic construct
  misc_feature 1..21: note = Synthetic
  source 1..21: mol_type = other RNA
aaaggaagacgaggagcactg

SEQ ID NO: 4360 - RNA, 21 nt, synthetic construct
  misc_feature 1..21: note = Synthetic
  source 1..21: mol_type = other RNA
aaaggctaacctggctgtcta

SEQ ID NO: 4361 - RNA, 21 nt, synthetic construct
  misc_feature 1..21: note = Synthetic
  source 1..21: mol_type = other RNA
aaaggcttatcacggttccct

SEQ ID NO: 4362 - RNA, 21 nt, synthetic construct
  misc_feature 1..21: note = Synthetic
  source 1..21: mol_type = other RNA
aaagtgacacccatctcccag

SEQ ID NO: 4363 - RNA, 21 nt, synthetic construct
  misc_feature 1..21: note = Synthetic
  source 1..21: mol_type = other RNA
aaagtgcaaacataacaaaaa

SEQ ID NO: 4364 - RNA, 21 nt, synthetic construct
  misc_feature 1..21: note = Synthetic
  source 1..21: mol_type = other RNA
aaagtgcaaggagaccacggg

SEQ ID NO: 4365 - RNA, 21 nt, synthetic construct
  misc_feature 1..21: note = Synthetic
  source 1..21: mol_type = other RNA
aaagtgctgggattacaggcg

SEQ ID NO: 4366 - RNA, 21 nt, synthetic construct
  misc_feature 1..21: note = Synthetic
  source 1..21: mol_type = other RNA
aaagttgatgctgttgatgtt

SEQ ID NO: 4367 - RNA, 21 nt, synthetic construct
  misc_feature 1..21: note = Synthetic
  source 1..21: mol_type = other RNA
aaataaatagattttatatat

SEQ ID NO: 4368 - RNA, 21 nt, synthetic construct
  misc_feature 1..21: note = Synthetic
  source 1..21: mol_type = other RNA
aaataataacacaaatgccaa

SEQ ID NO: 4369 - RNA, 21 nt, synthetic construct
  misc_feature 1..21: note = Synthetic
  source 1..21: mol_type = other RNA
aaataatctttgtacataaag

SEQ ID NO: 4370 - RNA, 21 nt, synthetic construct
  misc_feature 1..21: note = Synthetic
  source 1..21: mol_type = other RNA
aaatacagcaaccagggtttg

SEQ ID NO: 4371 - RNA, 21 nt, synthetic construct
  misc_feature 1..21: note = Synthetic
  source 1..21: mol_type = other RNA
aaatactttgtcctcaaagac

SEQ ID NO: 4372 - RNA, 21 nt, synthetic construct
  misc_feature 1..21: note = Synthetic
  source 1..21: mol_type = other RNA
aaatagattttatatatatgt

SEQ ID NO: 4373 - RNA, 21 nt, synthetic construct
  misc_feature 1..21: note = Synthetic
  source 1..21: mol_type = other RNA
aaatagggtcttcatctgttg

SEQ ID NO: 4374 - RNA, 21 nt, synthetic construct
  misc_feature 1..21: note = Synthetic
  source 1..21: mol_type = other RNA
aaatatataaaacaaagctct

SEQ ID NO: 4375 - RNA, 21 nt, synthetic construct
  misc_feature 1..21: note = Synthetic
  source 1..21: mol_type = other RNA
aaatattaagggtgaccagtg

SEQ ID NO: 4376 - RNA, 21 nt, synthetic construct
  misc_feature 1..21: note = Synthetic
  source 1..21: mol_type = other RNA
aaatcccaacccaagccattg

SEQ ID NO: 4377 - RNA, 21 nt, synthetic construct
  misc_feature 1..21: note = Synthetic
  source 1..21: mol_type = other RNA
aaatccccactatctgtacag

SEQ ID NO: 4378 - RNA, 21 nt, synthetic construct
  misc_feature 1..21: note = Synthetic
  source 1..21: mol_type = other RNA
aaatgccaaatgtacacagtg

SEQ ID NO: 4379 - RNA, 21 nt, synthetic construct
  misc_feature 1..21: note = Synthetic
  source 1..21: mol_type = other RNA
aaatgcctgagctcaaaccat

SEQ ID NO: 4380 - RNA, 21 nt, synthetic construct
  misc_feature 1..21: note = Synthetic
  source 1..21: mol_type = other RNA
aaatggaggtgtcatcctggt

SEQ ID NO: 4381 - RNA, 21 nt, synthetic construct
  misc_feature 1..21: note = Synthetic
  source 1..21: mol_type = other RNA
aaatggcttcgttgatgatat

SEQ ID NO: 4382 - RNA, 21 nt, synthetic construct
  misc_feature 1..21: note = Synthetic
  source 1..21: mol_type = other RNA
aaatgtacacagtgtacaact

SEQ ID NO: 4383 - RNA, 21 nt, synthetic construct
  misc_feature 1..21: note = Synthetic
  source 1..21: mol_type = other RNA
aaatgtggacctcatcctctg

SEQ ID NO: 4384 - RNA, 21 nt, synthetic construct
  misc_feature 1..21: note = Synthetic
  source 1..21: mol_type = other RNA
aaattcattttttaagagatg

SEQ ID NO: 4385 - RNA, 21 nt, synthetic construct
  misc_feature 1..21: note = Synthetic
  source 1..21: mol_type = other RNA
aaatttaattgatcacagtaa

SEQ ID NO: 4386 - RNA, 21 nt, synthetic construct
  misc_feature 1..21: note = Synthetic
  source 1..21: mol_type = other RNA
aacaaaaaatccccactatct

SEQ ID NO: 4387 - RNA, 21 nt, synthetic construct
  misc_feature 1..21: note = Synthetic
  source 1..21: mol_type = other RNA
aacaaagctctggcaggcaat

SEQ ID NO: 4388 - RNA, 21 nt, synthetic construct
  misc_feature 1..21: note = Synthetic
  source 1..21: mol_type = other RNA
aacaaatacagcaaccagggt

SEQ ID NO: 4389 - RNA, 21 nt, synthetic construct
  misc_feature 1..21: note = Synthetic
  source 1..21: mol_type = other RNA
aacaaggccggcgaggtctca

SEQ ID NO: 4390 - RNA, 21 nt, synthetic construct
  misc_feature 1..21: note = Synthetic
  source 1..21: mol_type = other RNA
aacaagttgacatcggaacct

SEQ ID NO: 4391 - RNA, 21 nt, synthetic construct
  misc_feature 1..21: note = Synthetic
  source 1..21: mol_type = other RNA
aacacaaatgccaaatgtaca

SEQ ID NO: 4392 - RNA, 21 nt, synthetic construct
  misc_feature 1..21: note = Synthetic
  source 1..21: mol_type = other RNA
aacacacacgacagaaaacag

SEQ ID NO: 4393 - RNA, 21 nt, synthetic construct
  misc_feature 1..21: note = Synthetic
  source 1..21: mol_type = other RNA
aacacatacccatcaacgaca

SEQ ID NO: 4394 - RNA, 21 nt, synthetic construct
  misc_feature 1..21: note = Synthetic
  source 1..21: mol_type = other RNA
aacacggcgatttcagaaaga

SEQ ID NO: 4395 - RNA, 21 nt, synthetic construct
  misc_feature 1..21: note = Synthetic
  source 1..21: mol_type = other RNA
aacacgtaaagacccctacag

SEQ ID NO: 4396 - RNA, 21 nt, synthetic construct
  misc_feature 1..21: note = Synthetic
  source 1..21: mol_type = other RNA
aacacgttgactcctgagttt

SEQ ID NO: 4397 - RNA, 21 nt, synthetic construct
  misc_feature 1..21: note = Synthetic
  source 1..21: mol_type = other RNA
aacagagacagtgcccaggac

SEQ ID NO: 4398 - RNA, 21 nt, synthetic construct
  misc_feature 1..21: note = Synthetic
  source 1..21: mol_type = other RNA
aacagccgccgttgttgtcca

SEQ ID NO: 4399 - RNA, 21 nt, synthetic construct
  misc_feature 1..21: note = Synthetic
  source 1..21: mol_type = other RNA
aacaggatccaccacgatggc

SEQ ID NO: 4400 - RNA, 21 nt, synthetic construct
  misc_feature 1..21: note = Synthetic
  source 1..21: mol_type = other RNA
aacaggtcgggtggttgtgtg

SEQ ID NO: 4401 - RNA, 21 nt, synthetic construct
  misc_feature 1..21: note = Synthetic
  source 1..21: mol_type = other RNA
aacagtaacacggcgatttca

SEQ ID NO: 4402 - RNA, 21 nt, synthetic construct
  misc_feature 1..21: note = Synthetic
  source 1..21: mol_type = other RNA
aacagtgcaaaataataacac

SEQ ID NO: 4403 - RNA, 21 nt, synthetic construct
  misc_feature 1..21: note = Synthetic
  source 1..21: mol_type = other RNA
aacagtttcaaccaatataca

SEQ ID NO: 4404 - RNA, 21 nt, synthetic construct
  misc_feature 1..21: note = Synthetic
  source 1..21: mol_type = other RNA
aacataacaaaaaatccccac

SEQ ID NO: 4405 - RNA, 21 nt, synthetic construct
  misc_feature 1..21: note = Synthetic
  source 1..21: mol_type = other RNA
aaccaaaatcccaacccaagc

SEQ ID NO: 4406 - RNA, 21 nt, synthetic construct
  misc_feature 1..21: note = Synthetic
  source 1..21: mol_type = other RNA
aaccaatatacaaagtgcaaa

SEQ ID NO: 4407 - RNA, 21 nt, synthetic construct
  misc_feature 1..21: note = Synthetic
  source 1..21: mol_type = other RNA
aaccagaaaggcttatcacgg

SEQ ID NO: 4408 - RNA, 21 nt, synthetic construct
  misc_feature 1..21: note = Synthetic
  source 1..21: mol_type = other RNA
aaccagggtttgcaaaaataa

SEQ ID NO: 4409 - RNA, 21 nt, synthetic construct
  misc_feature 1..21: note = Synthetic
  source 1..21: mol_type = other RNA
aaccatatcctctggggacag

SEQ ID NO: 4410 - RNA, 21 nt, synthetic construct
  misc_feature 1..21: note = Synthetic
  source 1..21: mol_type = other RNA
aaccatcctcccacctcagcc

SEQ ID NO: 4411 - RNA, 21 nt, synthetic construct
  misc_feature 1..21: note = Synthetic
  source 1..21: mol_type = other RNA
aacccaagccattgcatgggc

SEQ ID NO: 4412 - RNA, 21 nt, synthetic construct
  misc_feature 1..21: note = Synthetic
  source 1..21: mol_type = other RNA
aacccacctcgaaagacactg

SEQ ID NO: 4413 - RNA, 21 nt, synthetic construct
  misc_feature 1..21: note = Synthetic
  source 1..21: mol_type = other RNA
aacccagtagaggcggccact

SEQ ID NO: 4414 - RNA, 21 nt, synthetic construct
  misc_feature 1..21: note = Synthetic
  source 1..21: mol_type = other RNA
aaccccctacacagggccccg

SEQ ID NO: 4415 - RNA, 21 nt, synthetic construct
  misc_feature 1..21: note = Synthetic
  source 1..21: mol_type = other RNA
aaccctggcttcccgcgattg

SEQ ID NO: 4416 - RNA, 21 nt, synthetic construct
  misc_feature 1..21: note = Synthetic
  source 1..21: mol_type = other RNA
aaccgaggccttgagggtggc

SEQ ID NO: 4417 - RNA, 21 nt, synthetic construct
  misc_feature 1..21: note = Synthetic
  source 1..21: mol_type = other RNA
aaccgcggaggaacgccaggc

SEQ ID NO: 4418 - RNA, 21 nt, synthetic construct
  misc_feature 1..21: note = Synthetic
  source 1..21: mol_type = other RNA
aaccggggacttcgccaggag

SEQ ID NO: 4419 - RNA, 21 nt, synthetic construct
  misc_feature 1..21: note = Synthetic
  source 1..21: mol_type = other RNA
aaccgggtgtctcaggcactt

SEQ ID NO: 4420 - RNA, 21 nt, synthetic construct
  misc_feature 1..21: note = Synthetic
  source 1..21: mol_type = other RNA
aacctccacctcctgggctca

SEQ ID NO: 4421 - RNA, 21 nt, synthetic construct
  misc_feature 1..21: note = Synthetic
  source 1..21: mol_type = other RNA
aacctcgtaaggaaccgaggc

SEQ ID NO: 4422 - RNA, 21 nt, synthetic construct
  misc_feature 1..21: note = Synthetic
  source 1..21: mol_type = other RNA
aacctgaagtcccgtcaaacg

SEQ ID NO: 4423 - RNA, 21 nt, synthetic construct
  misc_feature 1..21: note = Synthetic
  source 1..21: mol_type = other RNA
aacctgcccctctctgtcccc

SEQ ID NO: 4424 - RNA, 21 nt, synthetic construct
  misc_feature 1..21: note = Synthetic
  source 1..21: mol_type = other RNA
aacctggctgtctagcaaggc

SEQ ID NO: 4425 - RNA, 21 nt, synthetic construct
  misc_feature 1..21: note = Synthetic
  source 1..21: mol_type = other RNA
aacctgtgaggcggttggcac

SEQ ID NO: 4426 - RNA, 21 nt, synthetic construct
  misc_feature 1..21: note = Synthetic
  source 1..21: mol_type = other RNA
aaccttctatacagtggttta

SEQ ID NO: 4427 - RNA, 21 nt, synthetic construct
  misc_feature 1..21: note = Synthetic
  source 1..21: mol_type = other RNA
aacgacaagattggggaagtg

SEQ ID NO: 4428 - RNA, 21 nt, synthetic construct
  misc_feature 1..21: note = Synthetic
  source 1..21: mol_type = other RNA
aacgatccagactggaggatt

SEQ ID NO: 4429 - RNA, 21 nt, synthetic construct
  misc_feature 1..21: note = Synthetic
  source 1..21: mol_type = other RNA
aacgcagccaacttcatcgct

SEQ ID NO: 4430 - RNA, 21 nt, synthetic construct
  misc_feature 1..21: note = Synthetic
  source 1..21: mol_type = other RNA
aacggagggcgactcgtgtat

SEQ ID NO: 4431 - RNA, 21 nt, synthetic construct
  misc_feature 1..21: note = Synthetic
  source 1..21: mol_type = other RNA
aacggggacatcattctccca

SEQ ID NO: 4432 - RNA, 21 nt, synthetic construct
  misc_feature 1..21: note = Synthetic
  source 1..21: mol_type = other RNA
aacgtcgcccagagcttggtg

SEQ ID NO: 4433 - RNA, 21 nt, synthetic construct
  misc_feature 1..21: note = Synthetic
  source 1..21: mol_type = other RNA
aacgtttcaacctcgtaagga

SEQ ID NO: 4434 - RNA, 21 nt, synthetic construct
  misc_feature 1..21: note = Synthetic
  source 1..21: mol_type = other RNA
aacgttttcctcttcacgccc

SEQ ID NO: 4435 - RNA, 21 nt, synthetic construct
  misc_feature 1..21: note = Synthetic
  source 1..21: mol_type = other RNA
aactcaaaacttcctggagag

SEQ ID NO: 4436 - RNA, 21 nt, synthetic construct
  misc_feature 1..21: note = Synthetic
  source 1..21: mol_type = other RNA
aactcaagtgatccagctcag

SEQ ID NO: 4437 - RNA, 21 nt, synthetic construct
  misc_feature 1..21: note = Synthetic
  source 1..21: mol_type = other RNA
aactcctgaactcaagtgatc

SEQ ID NO: 4438 - RNA, 21 nt, synthetic construct
  misc_feature 1..21: note = Synthetic
  source 1..21: mol_type = other RNA
aactcgaaggccgagcagggg

SEQ ID NO: 4439 - RNA, 21 nt, synthetic construct
  misc_feature 1..21: note = Synthetic
  source 1..21: mol_type = other RNA
aactcgtcctgggagcacgtc

SEQ ID NO: 4440 - RNA, 21 nt, synthetic construct
  misc_feature 1..21: note = Synthetic
  source 1..21: mol_type = other RNA
aactcgtttctttcgcatctg

SEQ ID NO: 4441 - RNA, 21 nt, synthetic construct
  misc_feature 1..21: note = Synthetic
  source 1..21: mol_type = other RNA
aactctgaactgagaaagtgc

SEQ ID NO: 4442 - RNA, 21 nt, synthetic construct
  misc_feature 1..21: note = Synthetic
  source 1..21: mol_type = other RNA
aactgagaaagtgcaaggaga

SEQ ID NO: 4443 - RNA, 21 nt, synthetic construct
  misc_feature 1..21: note = Synthetic
  source 1..21: mol_type = other RNA
aactgaggaatgcagcggttg

SEQ ID NO: 4444 - RNA, 21 nt, synthetic construct
  misc_feature 1..21: note = Synthetic
  source 1..21: mol_type = other RNA
aactgccgagagatgcacttc

SEQ ID NO: 4445 - RNA, 21 nt, synthetic construct
  misc_feature 1..21: note = Synthetic
  source 1..21: mol_type = other RNA
aacttcatcgctcatgtcctt

SEQ ID NO: 4446 - RNA, 21 nt, synthetic construct
  misc_feature 1..21: note = Synthetic
  source 1..21: mol_type = other RNA
aacttcctggagagaaatgga

SEQ ID NO: 4447 - RNA, 21 nt, synthetic construct
  misc_feature 1..21: note = Synthetic
  source 1..21: mol_type = other RNA
aacttgatcggggctggtggg

SEQ ID NO: 4448 - RNA, 21 nt, synthetic construct
  misc_feature 1..21: note = Synthetic
  source 1..21: mol_type = other RNA
aacttgggcgagtgggggttg

SEQ ID NO: 4449 - RNA, 21 nt, synthetic construct
  misc_feature 1..21: note = Synthetic
  source 1..21: mol_type = other RNA
aacttgttgggtccctcgcag

SEQ ID NO: 4450 - RNA, 21 nt, synthetic construct
  misc_feature 1..21: note = Synthetic
  source 1..21: mol_type = other RNA
aactttttggtttttgtagag

SEQ ID NO: 4451 - RNA, 21 nt, synthetic construct
  misc_feature 1..21: note = Synthetic
  source 1..21: mol_type = other RNA
aagaaaccaaaatcccaaccc

SEQ ID NO: 4452 - RNA, 21 nt, synthetic construct
  misc_feature 1..21: note = Synthetic
  source 1..21: mol_type = other RNA
aagaaatttaattgatcacag

SEQ ID NO: 4453 - RNA, 21 nt, synthetic construct
  misc_feature 1..21: note = Synthetic
  source 1..21: mol_type = other RNA
aagaacctgaagtcccgtcaa

SEQ ID NO: 4454 - RNA, 21 nt, synthetic construct
  misc_feature 1..21: note = Synthetic
  source 1..21: mol_type = other RNA
aagaagaggcatttcagaggc

SEQ ID NO: 4455 - RNA, 21 nt, synthetic construct
  misc_feature 1..21: note = Synthetic
  source 1..21: mol_type = other RNA
aagaagaggtaggcgatggag

SEQ ID NO: 4456 - RNA, 21 nt, synthetic construct
  misc_feature 1..21: note = Synthetic
  source 1..21: mol_type = other RNA
aagacactgggtgggtcatga

SEQ ID NO: 4457 - RNA, 21 nt, synthetic construct
  misc_feature 1..21: note = Synthetic
  source 1..21: mol_type = other RNA
aagacattcaggctacaaaaa

SEQ ID NO: 4458 - RNA, 21 nt, synthetic construct
  misc_feature 1..21: note = Synthetic
  source 1..21: mol_type = other RNA
aagacccccaggcaaaggaag

SEQ ID NO: 4459 - RNA, 21 nt, synthetic construct
  misc_feature 1..21: note = Synthetic
  source 1..21: mol_type = other RNA
aagacccctacagcgctgcgg

SEQ ID NO: 4460 - RNA, 21 nt, synthetic construct
  misc_feature 1..21: note = Synthetic
  source 1..21: mol_type = other RNA
aagacgacaatggcagttctc

SEQ ID NO: 4461 - RNA, 21 nt, synthetic construct
  misc_feature 1..21: note = Synthetic
  source 1..21: mol_type = other RNA
aagacgaggagcacgatgggg

SEQ ID NO: 4462 - RNA, 21 nt, synthetic construct
  misc_feature 1..21: note = Synthetic
  source 1..21: mol_type = other RNA
aagacgaggagcactgtaggg

SEQ ID NO: 4463 - RNA, 21 nt, synthetic construct
  misc_feature 1..21: note = Synthetic
  source 1..21: mol_type = other RNA
aagacggccaaggagaagggg

SEQ ID NO: 4464 - RNA, 21 nt, synthetic construct
  misc_feature 1..21: note = Synthetic
  source 1..21: mol_type = other RNA
aagagaaccatatcctctggg

SEQ ID NO: 4465 - RNA, 21 nt, synthetic construct
  misc_feature 1..21: note = Synthetic
  source 1..21: mol_type = other RNA
aagagacgccgtgggctctgt

SEQ ID NO: 4466 - RNA, 21 nt, synthetic construct
  misc_feature 1..21: note = Synthetic
  source 1..21: mol_type = other RNA
aagagatggggtcttactatg

SEQ ID NO: 4467 - RNA, 21 nt, synthetic construct
  misc_feature 1..21: note = Synthetic
  source 1..21: mol_type = other RNA
aagaggcatttcagaggcaat

SEQ ID NO: 4468 - RNA, 21 nt, synthetic construct
  misc_feature 1..21: note = Synthetic
  source 1..21: mol_type = other RNA
aagaggtaaacacgttgactc

SEQ ID NO: 4469 - RNA, 21 nt, synthetic construct
  misc_feature 1..21: note = Synthetic
  source 1..21: mol_type = other RNA
aagaggtaggcgatggagccc

SEQ ID NO: 4470 - RNA, 21 nt, synthetic construct
  misc_feature 1..21: note = Synthetic
  source 1..21: mol_type = other RNA
aagatctcggctgcagaccaa

SEQ ID NO: 4471 - RNA, 21 nt, synthetic construct
  misc_feature 1..21: note = Synthetic
  source 1..21: mol_type = other RNA
aagatggtcttccggttgccc

SEQ ID NO: 4472 - RNA, 21 nt, synthetic construct
  misc_feature 1..21: note = Synthetic
  source 1..21: mol_type = other RNA
aagattggggaagtgaatggc

SEQ ID NO: 4473 - RNA, 21 nt, synthetic construct
  misc_feature 1..21: note = Synthetic
  source 1..21: mol_type = other RNA
aagcacgtctcctgggactca

SEQ ID NO: 4474 - RNA, 21 nt, synthetic construct
  misc_feature 1..21: note = Synthetic
  source 1..21: mol_type = other RNA
aagcactaggtgggcggacat

SEQ ID NO: 4475 - RNA, 21 nt, synthetic construct
  misc_feature 1..21: note = Synthetic
  source 1..21: mol_type = other RNA
aagcagtcccggtctgagtca

SEQ ID NO: 4476 - RNA, 21 nt, synthetic construct
  misc_feature 1..21: note = Synthetic
  source 1..21: mol_type = other RNA
aagcagtggcataatcatagc

SEQ ID NO: 4477 - RNA, 21 nt, synthetic construct
  misc_feature 1..21: note = Synthetic
  source 1..21: mol_type = other RNA
aagcattcgttggtcccgcac

SEQ ID NO: 4478 - RNA, 21 nt, synthetic construct
  misc_feature 1..21: note = Synthetic
  source 1..21: mol_type = other RNA
aagccactcatacatacaacg

SEQ ID NO: 4479 - RNA, 21 nt, synthetic construct
  misc_feature 1..21: note = Synthetic
  source 1..21: mol_type = other RNA
aagccacttgcttctctgggc

SEQ ID NO: 4480 - RNA, 21 nt, synthetic construct
  misc_feature 1..21: note = Synthetic
  source 1..21: mol_type = other RNA
aagccatgaacaggatccacc

SEQ ID NO: 4481 - RNA, 21 nt, synthetic construct
  misc_feature 1..21: note = Synthetic
  source 1..21: mol_type = other RNA
aagccattgcatgggcactgt

SEQ ID NO: 4482 - RNA, 21 nt, synthetic construct
  misc_feature 1..21: note = Synthetic
  source 1..21: mol_type = other RNA
aagccgccagttcttccatag

SEQ ID NO: 4483 - RNA, 21 nt, synthetic construct
  misc_feature 1..21: note = Synthetic
  source 1..21: mol_type = other RNA
aagccgtcggggcacaggcac

SEQ ID NO: 4484 - RNA, 21 nt, synthetic construct
  misc_feature 1..21: note = Synthetic
  source 1..21: mol_type = other RNA
aagcctgttctgcctcccaga

SEQ ID NO: 4485 - RNA, 21 nt, synthetic construct
  misc_feature 1..21: note = Synthetic
  source 1..21: mol_type = other RNA
aagccttcctcacactggcac

SEQ ID NO: 4486 - RNA, 21 nt, synthetic construct
  misc_feature 1..21: note = Synthetic
  source 1..21: mol_type = other RNA
aagcgttgcacacagtccagt

SEQ ID NO: 4487 - RNA, 21 nt, synthetic construct
  misc_feature 1..21: note = Synthetic
  source 1..21: mol_type = other RNA
aagctccgcttcccgggttca

SEQ ID NO: 4488 - RNA, 21 nt, synthetic construct
  misc_feature 1..21: note = Synthetic
  source 1..21: mol_type = other RNA
aagctctggcaggcaatgctt

SEQ ID NO: 4489 - RNA, 21 nt, synthetic construct
  misc_feature 1..21: note = Synthetic
  source 1..21: mol_type = other RNA
aagctggcgggaccacaggtg

SEQ ID NO: 4490 - RNA, 21 nt, synthetic construct
  misc_feature 1..21: note = Synthetic
  source 1..21: mol_type = other RNA
aagctgggtgctgcagatcat

SEQ ID NO: 4491 - RNA, 21 nt, synthetic construct
  misc_feature 1..21: note = Synthetic
  source 1..21: mol_type = other RNA
aaggaaccgaggccttgaggg

SEQ ID NO: 4492 - RNA, 21 nt, synthetic construct
  misc_feature 1..21: note = Synthetic
  source 1..21: mol_type = other RNA
aaggaagaaaccaaaatccca

SEQ ID NO: 4493 - RNA, 21 nt, synthetic construct
  misc_feature 1..21: note = Synthetic
  source 1..21: mol_type = other RNA
aaggaagacccccaggcaaag

SEQ ID NO: 4494 - RNA, 21 nt, synthetic construct
  misc_feature 1..21: note = Synthetic
  source 1..21: mol_type = other RNA
aaggaagacgaggagcacgat

SEQ ID NO: 4495 - RNA, 21 nt, synthetic construct
  misc_feature 1..21: note = Synthetic
  source 1..21: mol_type = other RNA
aaggaagacgaggagcactgt

SEQ ID NO: 4496 - RNA, 21 nt, synthetic construct
  misc_feature 1..21: note = Synthetic
  source 1..21: mol_type = other RNA
aaggaaggtacaaacccacct

SEQ ID NO: 4497 - RNA, 21 nt, synthetic construct
  misc_feature 1..21: note = Synthetic
  source 1..21: mol_type = other RNA
aaggagaaggggtgggccagc

SEQ ID NO: 4498 - RNA, 21 nt, synthetic construct
  misc_feature 1..21: note = Synthetic
  source 1..21: mol_type = other RNA
aaggagaccacgggaatggaa

SEQ ID NO: 4499 - RNA, 21 nt, synthetic construct
  misc_feature 1..21: note = Synthetic
  source 1..21: mol_type = other RNA
aaggaggggcggggagattct

SEQ ID NO: 4500 - RNA, 21 nt, synthetic construct
  misc_feature 1..21: note = Synthetic
  source 1..21: mol_type = other RNA
aaggccgagcaggggctactg

SEQ ID NO: 4501 - RNA, 21 nt, synthetic construct
  misc_feature 1..21: note = Synthetic
  source 1..21: mol_type = other RNA
aaggccggcgaggtctcagga

SEQ ID NO: 4502 - RNA, 21 nt, synthetic construct
  misc_feature 1..21: note = Synthetic
  source 1..21: mol_type = other RNA
aaggcgacggtccagcgcaat

SEQ ID NO: 4503 - RNA, 21 nt, synthetic construct
  misc_feature 1..21: note = Synthetic
  source 1..21: mol_type = other RNA
aaggctaacctggctgtctag

SEQ ID NO: 4504 - RNA, 21 nt, synthetic construct
  misc_feature 1..21: note = Synthetic
  source 1..21: mol_type = other RNA
aaggcttatcacggttccctg

SEQ ID NO: 4505 - RNA, 21 nt, synthetic construct
  misc_feature 1..21: note = Synthetic
  source 1..21: mol_type = other RNA
aaggcttgcatagaagaggta

SEQ ID NO: 4506 - RNA, 21 nt, synthetic construct
  misc_feature 1..21: note = Synthetic
  source 1..21: mol_type = other RNA
aaggggtgggccagcctcttt

SEQ ID NO: 4507 - RNA, 21 nt, synthetic construct
  misc_feature 1..21: note = Synthetic
  source 1..21: mol_type = other RNA
aagggtgaccagtgactcagg

SEQ ID NO: 4508 - RNA, 21 nt, synthetic construct
  misc_feature 1..21: note = Synthetic
  source 1..21: mol_type = other RNA
aagggttctgggcagggacgg

SEQ ID NO: 4509 - RNA, 21 nt, synthetic construct
  misc_feature 1..21: note = Synthetic
  source 1..21: mol_type = other RNA
aaggtaaccgggtgtctcagg

SEQ ID NO: 4510 - RNA, 21 nt, synthetic construct
  misc_feature 1..21: note = Synthetic
  source 1..21: mol_type = other RNA
aaggtacaaacccacctcgaa

SEQ ID NO: 4511 - RNA, 21 nt, synthetic construct
  misc_feature 1..21: note = Synthetic
  source 1..21: mol_type = other RNA
aaggtcattgcagacgtggga

SEQ ID NO: 4512 - RNA, 21 nt, synthetic construct
  misc_feature 1..21: note = Synthetic
  source 1..21: mol_type = other RNA
aaggtggggacggaggtgtcg

SEQ ID NO: 4513 - RNA, 21 nt, synthetic construct
  misc_feature 1..21: note = Synthetic
  source 1..21: mol_type = other RNA
aagtagctgggatcacaggca

SEQ ID NO: 4514 - RNA, 21 nt, synthetic construct
  misc_feature 1..21: note = Synthetic
  source 1..21: mol_type = other RNA
aagtccccggatttgcaggtg

SEQ ID NO: 4515 - RNA, 21 nt, synthetic construct
  misc_feature 1..21: note = Synthetic
  source 1..21: mol_type = other RNA
aagtcccggtcaacctgcccc

SEQ ID NO: 4516 - RNA, 21 nt, synthetic construct
  misc_feature 1..21: note = Synthetic
  source 1..21: mol_type = other RNA
aagtcccgtcaaacgatccag

SEQ ID NO: 4517 - RNA, 21 nt, synthetic construct
  misc_feature 1..21: note = Synthetic
  source 1..21: mol_type = other RNA
aagtgaatggcttggaggcat

SEQ ID NO: 4518 - RNA, 21 nt, synthetic construct
  misc_feature 1..21: note = Synthetic
  source 1..21: mol_type = other RNA
aagtgacacccatctcccaga

SEQ ID NO: 4519 - RNA, 21 nt, synthetic construct
  misc_feature 1..21: note = Synthetic
  source 1..21: mol_type = other RNA
aagtgataacagtttcaacca

SEQ ID NO: 4520 - RNA, 21 nt, synthetic construct
  misc_feature 1..21: note = Synthetic
  source 1..21: mol_type = other RNA
aagtgatccagctcagcctcc

SEQ ID NO: 4521 - RNA, 21 nt, synthetic construct
  misc_feature 1..21: note = Synthetic
  source 1..21: mol_type = other RNA
aagtgcaaacataacaaaaaa

SEQ ID NO: 4522 - RNA, 21 nt, synthetic construct
  misc_feature 1..21: note = Synthetic
  source 1..21: mol_type = other RNA
aagtgcaaggagaccacggga

SEQ ID NO: 4523 - RNA, 21 nt, synthetic construct
  misc_feature 1..21: note = Synthetic
  source 1..21: mol_type = other RNA
aagtgctgggattacaggcgt

SEQ ID NO: 4524 - RNA, 21 nt, synthetic construct
  misc_feature 1..21: note = Synthetic
  source 1..21: mol_type = other RNA
aagtggaagcactaggtgggc

SEQ ID NO: 4525 - RNA, 21 nt, synthetic construct
  misc_feature 1..21: note = Synthetic
  source 1..21: mol_type = other RNA
aagtggcatcatttggtgaat

SEQ ID NO: 4526 - RNA, 21 nt, synthetic construct
  misc_feature 1..21: note = Synthetic
  source 1..21: mol_type = other RNA
aagtgggtaggggtcgggagg

SEQ ID NO: 4527 - RNA, 21 nt, synthetic construct
  misc_feature 1..21: note = Synthetic
  source 1..21: mol_type = other RNA
aagttgacatcggaacctgtg

SEQ ID NO: 4528 - RNA, 21 nt, synthetic construct
  misc_feature 1..21: note = Synthetic
  source 1..21: mol_type = other RNA
aagttgatgctgttgatgttc

SEQ ID NO: 4529 - RNA, 21 nt, synthetic construct
  misc_feature 1..21: note = Synthetic
  source 1..21: mol_type = other RNA
aagtttggagtcaacccagta

SEQ ID NO: 4530 - RNA, 21 nt, synthetic construct
  misc_feature 1..21: note = Synthetic
  source 1..21: mol_type = other RNA
aataaaacaaggccggcgagg

SEQ ID NO: 4531 - RNA, 21 nt, synthetic construct
  misc_feature 1..21: note = Synthetic
  source 1..21: mol_type = other RNA
aataaatagattttatatata

SEQ ID NO: 4532 - RNA, 21 nt, synthetic construct
  misc_feature 1..21: note = Synthetic
  source 1..21: mol_type = other RNA
aataaatatataaaacaaagc

SEQ ID NO: 4533 - RNA, 21 nt, synthetic construct
  misc_feature 1..21: note = Synthetic
  source 1..21: mol_type = other RNA
aataaatattaagggtgacca

SEQ ID NO: 4534 - RNA, 21 nt, synthetic construct
  misc_feature 1..21: note = Synthetic
  source 1..21: mol_type = other RNA
aataacacaaatgccaaatgt

SEQ ID NO: 4535 - RNA, 21 nt, synthetic construct
  misc_feature 1..21: note = Synthetic
  source 1..21: mol_type = other RNA
aataaccccctacacagggcc

SEQ ID NO: 4536 - RNA, 21 nt, synthetic construct
  misc_feature 1..21: note = Synthetic
  source 1..21: mol_type = other RNA
aataacgttttcctcttcacg

SEQ ID NO: 4537 - RNA, 21 nt, synthetic construct
  misc_feature 1..21: note = Synthetic
  source 1..21: mol_type = other RNA
aataataacacaaatgccaaa

SEQ ID NO: 4538 - RNA, 21 nt, synthetic construct
  misc_feature 1..21: note = Synthetic
  source 1..21: mol_type = other RNA
aataatctttgtacataaaga

SEQ ID NO: 4539 - RNA, 21 nt, synthetic construct
  misc_feature 1..21: note = Synthetic
  source 1..21: mol_type = other RNA
aatacagcaaccagggtttgc

SEQ ID NO: 4540 - RNA, 21 nt, synthetic construct
  misc_feature 1..21: note = Synthetic
  source 1..21: mol_type = other RNA
aatactttgtcctcaaagacg

SEQ ID NO: 4541 - RNA, 21 nt, synthetic construct
  misc_feature 1..21: note = Synthetic
  source 1..21: mol_type = other RNA
aatagattttatatatatgtg

SEQ ID NO: 4542 - RNA, 21 nt, synthetic construct
  misc_feature 1..21: note = Synthetic
  source 1..21: mol_type = other RNA
aatagggtcttcatctgttgc

SEQ ID NO: 4543 - RNA, 21 nt, synthetic construct
  misc_feature 1..21: note = Synthetic
  source 1..21: mol_type = other RNA
aatagtcactgaacaaataca

SEQ ID NO: 4544 - RNA, 21 nt, synthetic construct
  misc_feature 1..21: note = Synthetic
  source 1..21: mol_type = other RNA
aatatacaaagtgcaaacata

SEQ ID NO: 4545 - RNA, 21 nt, synthetic construct
  misc_feature 1..21: note = Synthetic
  source 1..21: mol_type = other RNA
aatatataaaacaaagctctg

SEQ ID NO: 4546 - RNA, 21 nt, synthetic construct
  misc_feature 1..21: note = Synthetic
  source 1..21: mol_type = other RNA
aatattaagggtgaccagtga

SEQ ID NO: 4547 - RNA, 21 nt, synthetic construct
  misc_feature 1..21: note = Synthetic
  source 1..21: mol_type = other RNA
aatcatagctcacgacagcct

SEQ ID NO: 4548 - RNA, 21 nt, synthetic construct
  misc_feature 1..21: note = Synthetic
  source 1..21: mol_type = other RNA
aatcccaacccaagccattgc

SEQ ID NO: 4549 - RNA, 21 nt, synthetic construct
  misc_feature 1..21: note = Synthetic
  source 1..21: mol_type = other RNA
aatccccactatctgtacagg

SEQ ID NO: 4550 - RNA, 21 nt, synthetic construct
  misc_feature 1..21: note = Synthetic
  source 1..21: mol_type = other RNA
aatcccttgtgacatcttcac

SEQ ID NO: 4551 - RNA, 21 nt, synthetic construct
  misc_feature 1..21: note = Synthetic
  source 1..21: mol_type = other RNA
aatccctttcctggcttaagg

SEQ ID NO: 4552 - RNA, 21 nt, synthetic construct
  misc_feature 1..21: note = Synthetic
  source 1..21: mol_type = other RNA
aatctcggctcactgcaagct

SEQ ID NO: 4553 - RNA, 21 nt, synthetic construct
  misc_feature 1..21: note = Synthetic
  source 1..21: mol_type = other RNA
aatctttgtacataaagaaga

SEQ ID NO: 4554 - RNA, 21 nt, synthetic construct
  misc_feature 1..21: note = Synthetic
  source 1..21: mol_type = other RNA
aatgagtttggtctcggtgcc

SEQ ID NO: 4555 - RNA, 21 nt, synthetic construct
  misc_feature 1..21: note = Synthetic
  source 1..21: mol_type = other RNA
aatgcagcggttgacacggcc

SEQ ID NO: 4556 - RNA, 21 nt, synthetic construct
  misc_feature 1..21: note = Synthetic
  source 1..21: mol_type = other RNA
aatgccaaatgtacacagtgt

SEQ ID NO: 4557 - RNA, 21 nt, synthetic construct
  misc_feature 1..21: note = Synthetic
  source 1..21: mol_type = other RNA
aatgcctgagctcaaaccatc

SEQ ID NO: 4558 - RNA, 21 nt, synthetic construct
  misc_feature 1..21: note = Synthetic
  source 1..21: mol_type = other RNA
aatgctttggtcttctctgtc

SEQ ID NO: 4559 - RNA, 21 nt, synthetic construct
  misc_feature 1..21: note = Synthetic
  source 1..21: mol_type = other RNA
aatggaagtgggtaggggtcg

SEQ ID NO: 4560 - RNA, 21 nt, synthetic construct
  misc_feature 1..21: note = Synthetic
  source 1..21: mol_type = other RNA
aatggacagagccctcacgct

SEQ ID NO: 4561 - RNA, 21 nt, synthetic construct
  misc_feature 1..21: note = Synthetic
  source 1..21: mol_type = other RNA
aatggaggtgtcatcctggtc

SEQ ID NO: 4562 - RNA, 21 nt, synthetic construct
  misc_feature 1..21: note = Synthetic
  source 1..21: mol_type = other RNA
aatggcagttctcgatattca

SEQ ID NO: 4563 - RNA, 21 nt, synthetic construct
  misc_feature 1..21: note = Synthetic
  source 1..21: mol_type = other RNA
aatggcttcgttgatgatatc

SEQ ID NO: 4564 - RNA, 21 nt, synthetic construct
  misc_feature 1..21: note = Synthetic
  source 1..21: mol_type = other RNA
aatggcttggaggcatttgca

SEQ ID NO: 4565 - RNA, 21 nt, synthetic construct
  misc_feature 1..21: note = Synthetic
  source 1..21: mol_type = other RNA
aatgtacacagtgtacaactc

SEQ ID NO: 4566 - RNA, 21 nt, synthetic construct
  misc_feature 1..21: note = Synthetic
  source 1..21: mol_type = other RNA
aatgtggacctcatcctctgt

SEQ ID NO: 4567 - RNA, 21 nt, synthetic construct
  misc_feature 1..21: note = Synthetic
  source 1..21: mol_type = other RNA
aatgttttcagtcaccagcga

SEQ ID NO: 4568 - RNA, 21 nt, synthetic construct
  misc_feature 1..21: note = Synthetic
  source 1..21: mol_type = other RNA
aattcattttttaagagatgg

SEQ ID NO: 4569 - RNA, 21 nt, synthetic construct
  misc_feature 1..21: note = Synthetic
  source 1..21: mol_type = other RNA
aattcgtcagggcgacaggtg

SEQ ID NO: 4570 - RNA, 21 nt, synthetic construct
  misc_feature 1..21: note = Synthetic
  source 1..21: mol_type = other RNA
aattgatcacagtaagacatt

SEQ ID NO: 4571 - RNA, 21 nt, synthetic construct
  misc_feature 1..21: note = Synthetic
  source 1..21: mol_type = other RNA
aattgccaatcccttgtgaca

SEQ ID NO: 4572 - RNA, 21 nt, synthetic construct
  misc_feature 1..21: note = Synthetic
  source 1..21: mol_type = other RNA
aatttaattgatcacagtaag

SEQ ID NO: 4573 - RNA, 21 nt, synthetic construct
  misc_feature 1..21: note = Synthetic
  source 1..21: mol_type = other RNA
aatttccagccccagggcccc

SEQ ID NO: 4574 - RNA, 21 nt, synthetic construct
  misc_feature 1..21: note = Synthetic
  source 1..21: mol_type = other RNA
aattttttgtatttttagtag

SEQ ID NO: 4575 - RNA, 21 nt, synthetic construct
  misc_feature 1..21: note = Synthetic
  source 1..21: mol_type = other RNA
acaaaaaatccccactatctg

SEQ ID NO: 4576 - RNA, 21 nt, synthetic construct
  misc_feature 1..21: note = Synthetic
  source 1..21: mol_type = other RNA
acaaaaaccttctatacagtg

SEQ ID NO: 4577 - RNA, 21 nt, synthetic construct
  misc_feature 1..21: note = Synthetic
  source 1..21: mol_type = other RNA
acaaacccacctcgaaagaca

SEQ ID NO: 4578 - RNA, 21 nt, synthetic construct
  misc_feature 1..21: note = Synthetic
  source 1..21: mol_type = other RNA
acaaagctctggcaggcaatg

SEQ ID NO: 4579 - RNA, 21 nt, synthetic construct
  misc_feature 1..21: note = Synthetic
  source 1..21: mol_type = other RNA
acaaagtgcaaacataacaaa

SEQ ID NO: 4580 - RNA, 21 nt, synthetic construct
  misc_feature 1..21: note = Synthetic
  source 1..21: mol_type = other RNA
acaaatacagcaaccagggtt

SEQ ID NO: 4581 - RNA, 21 nt, synthetic construct
  misc_feature 1..21: note = Synthetic
  source 1..21: mol_type = other RNA
acaaatgccaaatgtacacag

SEQ ID NO: 4582 - RNA, 21 nt, synthetic construct
  misc_feature 1..21: note = Synthetic
  source 1..21: mol_type = other RNA
acaacggggacatcattctcc

SEQ ID NO: 4583 - RNA, 21 nt, synthetic construct
  misc_feature 1..21: note = Synthetic
  source 1..21: mol_type = other RNA
acaactctgaactgagaaagt

SEQ ID NO: 4584 - RNA, 21 nt, synthetic construct
  misc_feature 1..21: note = Synthetic
  source 1..21: mol_type = other RNA
acaagattggggaagtgaatg

SEQ ID NO: 4585 - RNA, 21 nt, synthetic construct
  misc_feature 1..21: note = Synthetic
  source 1..21: mol_type = other RNA
acaagcacgtctcctgggact

SEQ ID NO: 4586 - RNA, 21 nt, synthetic construct
  misc_feature 1..21: note = Synthetic
  source 1..21: mol_type = other RNA
acaaggccggcgaggtctcag

SEQ ID NO: 4587 - RNA, 21 nt, synthetic construct
  misc_feature 1..21: note = Synthetic
  source 1..21: mol_type = other RNA
acaaggtggggacggaggtgt

SEQ ID NO: 4588 - RNA, 21 nt, synthetic construct
  misc_feature 1..21: note = Synthetic
  source 1..21: mol_type = other RNA
acaagttgacatcggaacctg

SEQ ID NO: 4589 - RNA, 21 nt, synthetic construct
  misc_feature 1..21: note = Synthetic
  source 1..21: mol_type = other RNA
acaatggacagagccctcacg

SEQ ID NO: 4590 - RNA, 21 nt, synthetic construct
  misc_feature 1..21: note = Synthetic
  source 1..21: mol_type = other RNA
acaatggcagttctcgatatt

SEQ ID NO: 4591 - RNA, 21 nt, synthetic construct
  misc_feature 1..21: note = Synthetic
  source 1..21: mol_type = other RNA
acaattgccaatcccttgtga

SEQ ID NO: 4592 - RNA, 21 nt, synthetic construct
  misc_feature 1..21: note = Synthetic
  source 1..21: mol_type = other RNA
acacaaatgccaaatgtacac

SEQ ID NO: 4593 - RNA, 21 nt, synthetic construct
  misc_feature 1..21: note = Synthetic
  source 1..21: mol_type = other RNA
acacacacgacagaaaacagt

SEQ ID NO: 4594 - RNA, 21 nt, synthetic construct
  misc_feature 1..21: note = Synthetic
  source 1..21: mol_type = other RNA
acacacgacagaaaacagtgc

SEQ ID NO: 4595 - RNA, 21 nt, synthetic construct
  misc_feature 1..21: note = Synthetic
  source 1..21: mol_type = other RNA
acacagctgcccccgagacca

SEQ ID NO: 4596 - RNA, 21 nt, synthetic construct
  misc_feature 1..21: note = Synthetic
  source 1..21: mol_type = other RNA
acacagggccccgagaatagt

SEQ ID NO: 4597 - RNA, 21 nt, synthetic construct
  misc_feature 1..21: note = Synthetic
  source 1..21: mol_type = other RNA
acacagtccagttcgtgcaaa

SEQ ID NO: 4598 - RNA, 21 nt, synthetic construct
  misc_feature 1..21: note = Synthetic
  source 1..21: mol_type = other RNA
acacagtgtacaactctgaac

SEQ ID NO: 4599 - RNA, 21 nt, synthetic construct
  misc_feature 1..21: note = Synthetic
  source 1..21: mol_type = other RNA
acacagtgttttgtccctggg

SEQ ID NO: 4600 - RNA, 21 nt, synthetic construct
  misc_feature 1..21: note = Synthetic
  source 1..21: mol_type = other RNA
acacatacccatcaacgacaa

SEQ ID NO: 4601 - RNA, 21 nt, synthetic construct
  misc_feature 1..21: note = Synthetic
  source 1..21: mol_type = other RNA
acaccagttcactcctcttgg

SEQ ID NO: 4602 - RNA, 21 nt, synthetic construct
  misc_feature 1..21: note = Synthetic
  source 1..21: mol_type = other RNA
acaccattcaggccccctttc

SEQ ID NO: 4603 - RNA, 21 nt, synthetic construct
  misc_feature 1..21: note = Synthetic
  source 1..21: mol_type = other RNA
acaccattctcctgcctcagc

SEQ ID NO: 4604 - RNA, 21 nt, synthetic construct
  misc_feature 1..21: note = Synthetic
  source 1..21: mol_type = other RNA
acacccatctcccagaagcca

SEQ ID NO: 4605 - RNA, 21 nt, synthetic construct
  misc_feature 1..21: note = Synthetic
  source 1..21: mol_type = other RNA
acacctgggtgcaggccacgt

SEQ ID NO: 4606 - RNA, 21 nt, synthetic construct
  misc_feature 1..21: note = Synthetic
  source 1..21: mol_type = other RNA
acacgacagaaaacagtgcaa

SEQ ID NO: 4607 - RNA, 21 nt, synthetic construct
  misc_feature 1..21: note = Synthetic
  source 1..21: mol_type = other RNA
acacggcccccacagctgaag

SEQ ID NO: 4608 - RNA, 21 nt, synthetic construct
  misc_feature 1..21: note = Synthetic
  source 1..21: mol_type = other RNA
acacggcgatttcagaaagaa

SEQ ID NO: 4609 - RNA, 21 nt, synthetic construct
  misc_feature 1..21: note = Synthetic
  source 1..21: mol_type = other RNA
acacgggctttccctggcctg

SEQ ID NO: 4610 - RNA, 21 nt, synthetic construct
  misc_feature 1..21: note = Synthetic
  source 1..21: mol_type = other RNA
acacgtaaagacccctacagc

SEQ ID NO: 4611 - RNA, 21 nt, synthetic construct
  misc_feature 1..21: note = Synthetic
  source 1..21: mol_type = other RNA
acacgttgactcctgagttta

SEQ ID NO: 4612 - RNA, 21 nt, synthetic construct
  misc_feature 1..21: note = Synthetic
  source 1..21: mol_type = other RNA
acactcatcgatatcgcactc

SEQ ID NO: 4613 - RNA, 21 nt, synthetic construct
  misc_feature 1..21: note = Synthetic
  source 1..21: mol_type = other RNA
acactcatcgatatcttcgca

SEQ ID NO: 4614 - RNA, 21 nt, synthetic construct
  misc_feature 1..21: note = Synthetic
  source 1..21: mol_type = other RNA
acactgccggctgccatggat

SEQ ID NO: 4615 - RNA, 21 nt, synthetic construct
  misc_feature 1..21: note = Synthetic
  source 1..21: mol_type = other RNA
acactggcacttgtagccacc

SEQ ID NO: 4616 - RNA, 21 nt, synthetic construct
  misc_feature 1..21: note = Synthetic
  source 1..21: mol_type = other RNA
acactgggtgggtcatgattc

SEQ ID NO: 4617 - RNA, 21 nt, synthetic construct
  misc_feature 1..21: note = Synthetic
  source 1..21: mol_type = other RNA
acacttgaacttgttgggtcc

SEQ ID NO: 4618 - RNA, 21 nt, synthetic construct
  misc_feature 1..21: note = Synthetic
  source 1..21: mol_type = other RNA
acagaaaacagtgcaaaataa

SEQ ID NO: 4619 - RNA, 21 nt, synthetic construct
  misc_feature 1..21: note = Synthetic
  source 1..21: mol_type = other RNA
acagacaagcacgtctcctgg

SEQ ID NO: 4620 - RNA, 21 nt, synthetic construct
  misc_feature 1..21: note = Synthetic
  source 1..21: mol_type = other RNA
acagacgaactgccgagagat

SEQ ID NO: 4621 - RNA, 21 nt, synthetic construct
  misc_feature 1..21: note = Synthetic
  source 1..21: mol_type = other RNA
acagagacagtgcccaggaca

SEQ ID NO: 4622 - RNA, 21 nt, synthetic construct
  misc_feature 1..21: note = Synthetic
  source 1..21: mol_type = other RNA
acagagcacagcggaaaccgg

SEQ ID NO: 4623 - RNA, 21 nt, synthetic construct
  misc_feature 1..21: note = Synthetic
  source 1..21: mol_type = other RNA
acagagccctcacgctactgg

SEQ ID NO: 4624 - RNA, 21 nt, synthetic construct
  misc_feature 1..21: note = Synthetic
  source 1..21: mol_type = other RNA
acagagtcggtccagtagatg

SEQ ID NO: 4625 - RNA, 21 nt, synthetic construct
  misc_feature 1..21: note = Synthetic
  source 1..21: mol_type = other RNA
acagatactggcagccgccat

SEQ ID NO: 4626 - RNA, 21 nt, synthetic construct
  misc_feature 1..21: note = Synthetic
  source 1..21: mol_type = other RNA
acagcaaccagggtttgcaaa

SEQ ID NO: 4627 - RNA, 21 nt, synthetic construct
  misc_feature 1..21: note = Synthetic
  source 1..21: mol_type = other RNA
acagccacacctgggtgcagg

SEQ ID NO: 4628 - RNA, 21 nt, synthetic construct
  misc_feature 1..21: note = Synthetic
  source 1..21: mol_type = other RNA
acagccagcccgtcgggggcc

SEQ ID NO: 4629 - RNA, 21 nt, synthetic construct
  misc_feature 1..21: note = Synthetic
  source 1..21: mol_type = other RNA
acagccgccgttgttgtccaa

SEQ ID NO: 4630 - RNA, 21 nt, synthetic construct
  misc_feature 1..21: note = Synthetic
  source 1..21: mol_type = other RNA
acagcctcaaatgcctgagct

SEQ ID NO: 4631 - RNA, 21 nt, synthetic construct
  misc_feature 1..21: note = Synthetic
  source 1..21: mol_type = other RNA
acagccttgcaggccttcgtg

SEQ ID NO: 4632 - RNA, 21 nt, synthetic construct
  misc_feature 1..21: note = Synthetic
  source 1..21: mol_type = other RNA
acagccttgctcgtctgagcc

SEQ ID NO: 4633 - RNA, 21 nt, synthetic construct
  misc_feature 1..21: note = Synthetic
  source 1..21: mol_type = other RNA
acagcgcagttttcctcgtca

SEQ ID NO: 4634 - RNA, 21 nt, synthetic construct
  misc_feature 1..21: note = Synthetic
  source 1..21: mol_type = other RNA
acagcgccagctggagtggat

SEQ ID NO: 4635 - RNA, 21 nt, synthetic construct
  misc_feature 1..21: note = Synthetic
  source 1..21: mol_type = other RNA
acagcgctgcggccactcatc

SEQ ID NO: 4636 - RNA, 21 nt, synthetic construct
  misc_feature 1..21: note = Synthetic
  source 1..21: mol_type = other RNA
acagcggaaaccggggacttc

SEQ ID NO: 4637 - RNA, 21 nt, synthetic construct
  misc_feature 1..21: note = Synthetic
  source 1..21: mol_type = other RNA
acagctgaagtccccggattt

SEQ ID NO: 4638 - RNA, 21 nt, synthetic construct
  misc_feature 1..21: note = Synthetic
  source 1..21: mol_type = other RNA
acagctgcccccgagaccaga

SEQ ID NO: 4639 - RNA, 21 nt, synthetic construct
  misc_feature 1..21: note = Synthetic
  source 1..21: mol_type = other RNA
acagctgggggatgcaggtgg

SEQ ID NO: 4640 - RNA, 21 nt, synthetic construct
  misc_feature 1..21: note = Synthetic
  source 1..21: mol_type = other RNA
acaggaaccgcggaggaacgc

SEQ ID NO: 4641 - RNA, 21 nt, synthetic construct
  misc_feature 1..21: note = Synthetic
  source 1..21: mol_type = other RNA
acaggacagccttgctcgtct

SEQ ID NO: 4642 - RNA, 21 nt, synthetic construct
  misc_feature 1..21: note = Synthetic
  source 1..21: mol_type = other RNA
acaggatccaccacgatggcc

SEQ ID NO: 4643 - RNA, 21 nt, synthetic construct
  misc_feature 1..21: note = Synthetic
  source 1..21: mol_type = other RNA
acaggcacgtgccaccgtacc

SEQ ID NO: 4644 - RNA, 21 nt, synthetic construct
  misc_feature 1..21: note = Synthetic
  source 1..21: mol_type = other RNA
acaggcactcgtagccgatct

SEQ ID NO: 4645 - RNA, 21 nt, synthetic construct
  misc_feature 1..21: note = Synthetic
  source 1..21: mol_type = other RNA
acaggcgtgagccactgcgcc

SEQ ID NO: 4646 - RNA, 21 nt, synthetic construct
  misc_feature 1..21: note = Synthetic
  source 1..21: mol_type = other RNA
acaggcgtgaggcacctgtgt

SEQ ID NO: 4647 - RNA, 21 nt, synthetic construct
  misc_feature 1..21: note = Synthetic
  source 1..21: mol_type = other RNA
acagggacgcatttacgtgct

SEQ ID NO: 4648 - RNA, 21 nt, synthetic construct
  misc_feature 1..21: note = Synthetic
  source 1..21: mol_type = other RNA
acagggcaaaggctaacctgg

SEQ ID NO: 4649 - RNA, 21 nt, synthetic construct
  misc_feature 1..21: note = Synthetic
  source 1..21: mol_type = other RNA
acagggccccgagaatagtca

SEQ ID NO: 4650 - RNA, 21 nt, synthetic construct
  misc_feature 1..21: note = Synthetic
  source 1..21: mol_type = other RNA
acaggtcagaccagtagattc

SEQ ID NO: 4651 - RNA, 21 nt, synthetic construct
  misc_feature 1..21: note = Synthetic
  source 1..21: mol_type = other RNA
acaggtcgggtggttgtgtgc

SEQ ID NO: 4652 - RNA, 21 nt, synthetic construct
  misc_feature 1..21: note = Synthetic
  source 1..21: mol_type = other RNA
acaggtgagcaccgggcagga

SEQ ID NO: 4653 - RNA, 21 nt, synthetic construct
  misc_feature 1..21: note = Synthetic
  source 1..21: mol_type = other RNA
acaggtgcccgccaccacgcc

SEQ ID NO: 4654 - RNA, 21 nt, synthetic construct
  misc_feature 1..21: note = Synthetic
  source 1..21: mol_type = other RNA
acaggtggccacagcgcagtt

SEQ ID NO: 4655 - RNA, 21 nt, synthetic construct
  misc_feature 1..21: note = Synthetic
  source 1..21: mol_type = other RNA
acaggtggccacaggacagcc

SEQ ID NO: 4656 - RNA, 21 nt, synthetic construct
  misc_feature 1..21: note = Synthetic
  source 1..21: mol_type = other RNA
acagtaacacggcgatttcag

SEQ ID NO: 4657 - RNA, 21 nt, synthetic construct
  misc_feature 1..21: note = Synthetic
  source 1..21: mol_type = other RNA
acagtaagacattcaggctac

SEQ ID NO: 4658 - RNA, 21 nt, synthetic construct
  misc_feature 1..21: note = Synthetic
  source 1..21: mol_type = other RNA
acagtaggttttcagccaaca

SEQ ID NO: 4659 - RNA, 21 nt, synthetic construct
  misc_feature 1..21: note = Synthetic
  source 1..21: mol_type = other RNA
acagtccagttcgtgcaaata

SEQ ID NO: 4660 - RNA, 21 nt, synthetic construct
  misc_feature 1..21: note = Synthetic
  source 1..21: mol_type = other RNA
acagtgcaaaataataacaca

SEQ ID NO: 4661 - RNA, 21 nt, synthetic construct
  misc_feature 1..21: note = Synthetic
  source 1..21: mol_type = other RNA
acagtgcccaggacagagtcg

SEQ ID NO: 4662 - RNA, 21 nt, synthetic construct
  misc_feature 1..21: note = Synthetic
  source 1..21: mol_type = other RNA
acagtggtttaaaaagtgaca

SEQ ID NO: 4663 - RNA, 21 nt, synthetic construct
  misc_feature 1..21: note = Synthetic
  source 1..21: mol_type = other RNA
acagtgtacaactctgaactg

SEQ ID NO: 4664 - RNA, 21 nt, synthetic construct
  misc_feature 1..21: note = Synthetic
  source 1..21: mol_type = other RNA
acagtgttttgtccctgggga

SEQ ID NO: 4665 - RNA, 21 nt, synthetic construct
  misc_feature 1..21: note = Synthetic
  source 1..21: mol_type = other RNA
acagtttcaaccaatatacaa

SEQ ID NO: 4666 - RNA, 21 nt, synthetic construct
  misc_feature 1..21: note = Synthetic
  source 1..21: mol_type = other RNA
acataaagaagaggcatttca

SEQ ID NO: 4667 - RNA, 21 nt, synthetic construct
  misc_feature 1..21: note = Synthetic
  source 1..21: mol_type = other RNA
acataaagacgacaatggcag

SEQ ID NO: 4668 - RNA, 21 nt, synthetic construct
  misc_feature 1..21: note = Synthetic
  source 1..21: mol_type = other RNA
acataacaaaaaatccccact

SEQ ID NO: 4669 - RNA, 21 nt, synthetic construct
  misc_feature 1..21: note = Synthetic
  source 1..21: mol_type = other RNA
acatacaacggggacatcatt

SEQ ID NO: 4670 - RNA, 21 nt, synthetic construct
  misc_feature 1..21: note = Synthetic
  source 1..21: mol_type = other RNA
acatacccatcaacgacaaga

SEQ ID NO: 4671 - RNA, 21 nt, synthetic construct
  misc_feature 1..21: note = Synthetic
  source 1..21: mol_type = other RNA
acatcagtgcaacagtaacac

SEQ ID NO: 4672 - RNA, 21 nt, synthetic construct
  misc_feature 1..21: note = Synthetic
  source 1..21: mol_type = other RNA
acatcattctcccaaaaagcg

SEQ ID NO: 4673 - RNA, 21 nt, synthetic construct
  misc_feature 1..21: note = Synthetic
  source 1..21: mol_type = other RNA
acatcccctcccctttcatct

SEQ ID NO: 4674 - RNA, 21 nt, synthetic construct
  misc_feature 1..21: note = Synthetic
  source 1..21: mol_type = other RNA
acatcgatgcttgagatggag

SEQ ID NO: 4675 - RNA, 21 nt, synthetic construct
  misc_feature 1..21: note = Synthetic
  source 1..21: mol_type = other RNA
acatcggaacctgtgaggcgg

SEQ ID NO: 4676 - RNA, 21 nt, synthetic construct
  misc_feature 1..21: note = Synthetic
  source 1..21: mol_type = other RNA
acatcttcacgcgggagtctg

SEQ ID NO: 4677 - RNA, 21 nt, synthetic construct
  misc_feature 1..21: note = Synthetic
  source 1..21: mol_type = other RNA
acatgaagccatgaacaggat

SEQ ID NO: 4678 - RNA, 21 nt, synthetic construct
  misc_feature 1..21: note = Synthetic
  source 1..21: mol_type = other RNA
acattaacgcagccaacttca

SEQ ID NO: 4679 - RNA, 21 nt, synthetic construct
  misc_feature 1..21: note = Synthetic
  source 1..21: mol_type = other RNA
acattcaggctacaaaaacct

SEQ ID NO: 4680 - RNA, 21 nt, synthetic construct
  misc_feature 1..21: note = Synthetic
  source 1..21: mol_type = other RNA
acattgtcactatctccaccg

SEQ ID NO: 4681 - RNA, 21 nt, synthetic construct
  misc_feature 1..21: note = Synthetic
  source 1..21: mol_type = other RNA
accaaaatcccaacccaagcc

SEQ ID NO: 4682 - RNA, 21 nt, synthetic construct
  misc_feature 1..21: note = Synthetic
  source 1..21: mol_type = other RNA
accaaggaggggcggggagat

SEQ ID NO: 4683 - RNA, 21 nt, synthetic construct
  misc_feature 1..21: note = Synthetic
  source 1..21: mol_type = other RNA
accaatatacaaagtgcaaac

SEQ ID NO: 4684 - RNA, 21 nt, synthetic construct
  misc_feature 1..21: note = Synthetic
  source 1..21: mol_type = other RNA
accacaggtgagcaccgggca

SEQ ID NO: 4685 - RNA, 21 nt, synthetic construct
  misc_feature 1..21: note = Synthetic
  source 1..21: mol_type = other RNA
accacgatggcccttggcttg

SEQ ID NO: 4686 - RNA, 21 nt, synthetic construct
  misc_feature 1..21: note = Synthetic
  source 1..21: mol_type = other RNA
accacgcccggctaatttttt

SEQ ID NO: 4687 - RNA, 21 nt, synthetic construct
  misc_feature 1..21: note = Synthetic
  source 1..21: mol_type = other RNA
accacggattcagccagatca

SEQ ID NO: 4688 - RNA, 21 nt, synthetic construct
  misc_feature 1..21: note = Synthetic
  source 1..21: mol_type = other RNA
accacgggaatggaagtgggt

SEQ ID NO: 4689 - RNA, 21 nt, synthetic construct
  misc_feature 1..21: note = Synthetic
  source 1..21: mol_type = other RNA
accacgttcctcaggttgggg

SEQ ID NO: 4690 - RNA, 21 nt, synthetic construct
  misc_feature 1..21: note = Synthetic
  source 1..21: mol_type = other RNA
accagaaaggcttatcacggt

SEQ ID NO: 4691 - RNA, 21 nt, synthetic construct
  misc_feature 1..21: note = Synthetic
  source 1..21: mol_type = other RNA
accagagacccagctccgtgg

SEQ ID NO: 4692 - RNA, 21 nt, synthetic construct
  misc_feature 1..21: note = Synthetic
  source 1..21: mol_type = other RNA
accagcgagtagatgtccaca

SEQ ID NO: 4693 - RNA, 21 nt, synthetic construct
  misc_feature 1..21: note = Synthetic
  source 1..21: mol_type = other RNA
accagctggaagccgtcgggg

SEQ ID NO: 4694 - RNA, 21 nt, synthetic construct
  misc_feature 1..21: note = Synthetic
  source 1..21: mol_type = other RNA
accaggctggtgtcctgacag

SEQ ID NO: 4695 - RNA, 21 nt, synthetic construct
  misc_feature 1..21: note = Synthetic
  source 1..21: mol_type = other RNA
accagggtttgcaaaaataaa

SEQ ID NO: 4696 - RNA, 21 nt, synthetic construct
  misc_feature 1..21: note = Synthetic
  source 1..21: mol_type = other RNA
accagtagattctattgctgg

SEQ ID NO: 4697 - RNA, 21 nt, synthetic construct
  misc_feature 1..21: note = Synthetic
  source 1..21: mol_type = other RNA
accagtcccggcagtctctag

SEQ ID NO: 4698 - RNA, 21 nt, synthetic construct
  misc_feature 1..21: note = Synthetic
  source 1..21: mol_type = other RNA
accagtgactcaggctctgcc

SEQ ID NO: 4699 - RNA, 21 nt, synthetic construct
  misc_feature 1..21: note = Synthetic
  source 1..21: mol_type = other RNA
accagttcactcctcttggct

SEQ ID NO: 4700 - RNA, 21 nt, synthetic construct
  misc_feature 1..21: note = Synthetic
  source 1..21: mol_type = other RNA
accatatcctctggggacagt

SEQ ID NO: 4701 - RNA, 21 nt, synthetic construct
  misc_feature 1..21: note = Synthetic
  source 1..21: mol_type = other RNA
accatcacagcgccagctgga

SEQ ID NO: 4702 - RNA, 21 nt, synthetic construct
  misc_feature 1..21: note = Synthetic
  source 1..21: mol_type = other RNA
accatcctcccacctcagcct

SEQ ID NO: 4703 - RNA, 21 nt, synthetic construct
  misc_feature 1..21: note = Synthetic
  source 1..21: mol_type = other RNA
accatcgaggggtagctgtag

SEQ ID NO: 4704 - RNA, 21 nt, synthetic construct
  misc_feature 1..21: note = Synthetic
  source 1..21: mol_type = other RNA
accatctgtctcgaggggtag

SEQ ID NO: 4705 - RNA, 21 nt, synthetic construct
  misc_feature 1..21: note = Synthetic
  source 1..21: mol_type = other RNA
accatgcatggtttttttttg

SEQ ID NO: 4706 - RNA, 21 nt, synthetic construct
  misc_feature 1..21: note = Synthetic
  source 1..21: mol_type = other RNA
accattcaggccccctttctt

SEQ ID NO: 4707 - RNA, 21 nt, synthetic construct
  misc_feature 1..21: note = Synthetic
  source 1..21: mol_type = other RNA
accattctcctgcctcagcct

SEQ ID NO: 4708 - RNA, 21 nt, synthetic construct
  misc_feature 1..21: note = Synthetic
  source 1..21: mol_type = other RNA
acccaagccattgcatgggca

SEQ ID NO: 4709 - RNA, 21 nt, synthetic construct
  misc_feature 1..21: note = Synthetic
  source 1..21: mol_type = other RNA
acccacctcgaaagacactgg

SEQ ID NO: 4710 - RNA, 21 nt, synthetic construct
  misc_feature 1..21: note = Synthetic
  source 1..21: mol_type = other RNA
acccacttgtaggagatgcat

SEQ ID NO: 4711 - RNA, 21 nt, synthetic construct
  misc_feature 1..21: note = Synthetic
  source 1..21: mol_type = other RNA
acccagctccgtggcgatggg

SEQ ID NO: 4712 - RNA, 21 nt, synthetic construct
  misc_feature 1..21: note = Synthetic
  source 1..21: mol_type = other RNA
acccagctgatttttaacttt

SEQ ID NO: 4713 - RNA, 21 nt, synthetic construct
  misc_feature 1..21: note = Synthetic
  source 1..21: mol_type = other RNA
acccagtagaggcggccactg

SEQ ID NO: 4714 - RNA, 21 nt, synthetic construct
  misc_feature 1..21: note = Synthetic
  source 1..21: mol_type = other RNA
acccatcaacgacaagattgg

SEQ ID NO: 4715 - RNA, 21 nt, synthetic construct
  misc_feature 1..21: note = Synthetic
  source 1..21: mol_type = other RNA
acccatctcccagaagccact

SEQ ID NO: 4716 - RNA, 21 nt, synthetic construct
  misc_feature 1..21: note = Synthetic
  source 1..21: mol_type = other RNA
acccccaggcaaaggaagacg

SEQ ID NO: 4717 - RNA, 21 nt, synthetic construct
  misc_feature 1..21: note = Synthetic
  source 1..21: mol_type = other RNA
accccctacacagggccccga

SEQ ID NO: 4718 - RNA, 21 nt, synthetic construct
  misc_feature 1..21: note = Synthetic
  source 1..21: mol_type = other RNA
acccctacagcgctgcggcca

SEQ ID NO: 4719 - RNA, 21 nt, synthetic construct
  misc_feature 1..21: note = Synthetic
  source 1..21: mol_type = other RNA
acccgcctcggcctcccaaag

SEQ ID NO: 4720 - RNA, 21 nt, synthetic construct
  misc_feature 1..21: note = Synthetic
  source 1..21: mol_type = other RNA
acccggatcacgacctgctgt

SEQ ID NO: 4721 - RNA, 21 nt, synthetic construct
  misc_feature 1..21: note = Synthetic
  source 1..21: mol_type = other RNA
acccgggacttgtcgtcgcct

SEQ ID NO: 4722 - RNA, 21 nt, synthetic construct
  misc_feature 1..21: note = Synthetic
  source 1..21: mol_type = other RNA
accctccaggttcacgcagag

SEQ ID NO: 4723 - RNA, 21 nt, synthetic construct
  misc_feature 1..21: note = Synthetic
  source 1..21: mol_type = other RNA
accctggcttcccgcgattgc

SEQ ID NO: 4724 - RNA, 21 nt, synthetic construct
  misc_feature 1..21: note = Synthetic
  source 1..21: mol_type = other RNA
accgaggccttgagggtggcc

SEQ ID NO: 4725 - RNA, 21 nt, synthetic construct
  misc_feature 1..21: note = Synthetic
  source 1..21: mol_type = other RNA
accgcggaggaacgccaggcc

SEQ ID NO: 4726 - RNA, 21 nt, synthetic construct
  misc_feature 1..21: note = Synthetic
  source 1..21: mol_type = other RNA
accgggcaggaggcctcgtct

SEQ ID NO: 4727 - RNA, 21 nt, synthetic construct
  misc_feature 1..21: note = Synthetic
  source 1..21: mol_type = other RNA
accggggacttcgccaggagg

SEQ ID NO: 4728 - RNA, 21 nt, synthetic construct
  misc_feature 1..21: note = Synthetic
  source 1..21: mol_type = other RNA
accgggtgtctcaggcactta

SEQ ID NO: 4729 - RNA, 21 nt, synthetic construct
  misc_feature 1..21: note = Synthetic
  source 1..21: mol_type = other RNA
accgtacccagctgattttta

SEQ ID NO: 4730 - RNA, 21 nt, synthetic construct
  misc_feature 1..21: note = Synthetic
  source 1..21: mol_type = other RNA
accgtgcatgttttaaacaca

SEQ ID NO: 4731 - RNA, 21 nt, synthetic construct
  misc_feature 1..21: note = Synthetic
  source 1..21: mol_type = other RNA
accgtggtgagcccaggggtg

SEQ ID NO: 4732 - RNA, 21 nt, synthetic construct
  misc_feature 1..21: note = Synthetic
  source 1..21: mol_type = other RNA
acctcagcctcgccatgcctg

SEQ ID NO: 4733 - RNA, 21 nt, synthetic construct
  misc_feature 1..21: note = Synthetic
  source 1..21: mol_type = other RNA
acctcatcctctgtggtcttc

SEQ ID NO: 4734 - RNA, 21 nt, synthetic construct
  misc_feature 1..21: note = Synthetic
  source 1..21: mol_type = other RNA
acctcatgatccacccgcctc

SEQ ID NO: 4735 - RNA, 21 nt, synthetic construct
  misc_feature 1..21: note = Synthetic
  source 1..21: mol_type = other RNA
acctccacctcctgggctcag

SEQ ID NO: 4736 - RNA, 21 nt, synthetic construct
  misc_feature 1..21: note = Synthetic
  source 1..21: mol_type = other RNA
acctccagaactgaggaatgc

SEQ ID NO: 4737 - RNA, 21 nt, synthetic construct
  misc_feature 1..21: note = Synthetic
  source 1..21: mol_type = other RNA
acctccgtgtccagagcgacc

SEQ ID NO: 4738 - RNA, 21 nt, synthetic construct
  misc_feature 1..21: note = Synthetic
  source 1..21: mol_type = other RNA
acctcctgggctcaggcgatc

SEQ ID NO: 4739 - RNA, 21 nt, synthetic construct
  misc_feature 1..21: note = Synthetic
  source 1..21: mol_type = other RNA
acctcgaaagacactgggtgg

SEQ ID NO: 4740 - RNA, 21 nt, synthetic construct
  misc_feature 1..21: note = Synthetic
  source 1..21: mol_type = other RNA
acctcgtaaggaaccgaggcc

SEQ ID NO: 4741 - RNA, 21 nt, synthetic construct
  misc_feature 1..21: note = Synthetic
  source 1..21: mol_type = other RNA
acctcgtgccggttggtgaag

SEQ ID NO: 4742 - RNA, 21 nt, synthetic construct
  misc_feature 1..21: note = Synthetic
  source 1..21: mol_type = other RNA
acctgaagtcccgtcaaacga

SEQ ID NO: 4743 - RNA, 21 nt, synthetic construct
  misc_feature 1..21: note = Synthetic
  source 1..21: mol_type = other RNA
acctgcccctctctgtccccg

SEQ ID NO: 4744 - RNA, 21 nt, synthetic construct
  misc_feature 1..21: note = Synthetic
  source 1..21: mol_type = other RNA
acctgctgtgtcctagctgga

SEQ ID NO: 4745 - RNA, 21 nt, synthetic construct
  misc_feature 1..21: note = Synthetic
  source 1..21: mol_type = other RNA
acctggctgtctagcaaggct

SEQ ID NO: 4746 - RNA, 21 nt, synthetic construct
  misc_feature 1..21: note = Synthetic
  source 1..21: mol_type = other RNA
acctgggtgcaggccacgtgt

SEQ ID NO: 4747 - RNA, 21 nt, synthetic construct
  misc_feature 1..21: note = Synthetic
  source 1..21: mol_type = other RNA
acctgtgaggcggttggcact

SEQ ID NO: 4748 - RNA, 21 nt, synthetic construct
  misc_feature 1..21: note = Synthetic
  source 1..21: mol_type = other RNA
acctgtgtctggccaaattca

SEQ ID NO: 4749 - RNA, 21 nt, synthetic construct
  misc_feature 1..21: note = Synthetic
  source 1..21: mol_type = other RNA
accttctatacagtggtttaa

SEQ ID NO: 4750 - RNA, 21 nt, synthetic construct
  misc_feature 1..21: note = Synthetic
  source 1..21: mol_type = other RNA
acctttagcctgacggtggat

SEQ ID NO: 4751 - RNA, 21 nt, synthetic construct
  misc_feature 1..21: note = Synthetic
  source 1..21: mol_type = other RNA
acgaactgccgagagatgcac

SEQ ID NO: 4752 - RNA, 21 nt, synthetic construct
  misc_feature 1..21: note = Synthetic
  source 1..21: mol_type = other RNA
acgacaagattggggaagtga

SEQ ID NO: 4753 - RNA, 21 nt, synthetic construct
  misc_feature 1..21: note = Synthetic
  source 1..21: mol_type = other RNA
acgacaatggcagttctcgat

SEQ ID NO: 4754 - RNA, 21 nt, synthetic construct
  misc_feature 1..21: note = Synthetic
  source 1..21: mol_type = other RNA
acgacagaaaacagtgcaaaa

SEQ ID NO: 4755 - RNA, 21 nt, synthetic construct
  misc_feature 1..21: note = Synthetic
  source 1..21: mol_type = other RNA
acgacagcctcaaatgcctga

SEQ ID NO: 4756 - RNA, 21 nt, synthetic construct
  misc_feature 1..21: note = Synthetic
  source 1..21: mol_type = other RNA
acgacctgctgtgtcctagct

SEQ ID NO: 4757 - RNA, 21 nt, synthetic construct
  misc_feature 1..21: note = Synthetic
  source 1..21: mol_type = other RNA
acgaggaaaggaagaaaccaa

SEQ ID NO: 4758 - RNA, 21 nt, synthetic construct
  misc_feature 1..21: note = Synthetic
  source 1..21: mol_type = other RNA
acgaggagcacgatggggagg

SEQ ID NO: 4759 - RNA, 21 nt, synthetic construct
  misc_feature 1..21: note = Synthetic
  source 1..21: mol_type = other RNA
acgaggagcactgtagggaga

SEQ ID NO: 4760 - RNA, 21 nt, synthetic construct
  misc_feature 1..21: note = Synthetic
  source 1..21: mol_type = other RNA
acgatcacggctttgaagtcc

SEQ ID NO: 4761 - RNA, 21 nt, synthetic construct
  misc_feature 1..21: note = Synthetic
  source 1..21: mol_type = other RNA
acgatccagactggaggattt

SEQ ID NO: 4762 - RNA, 21 nt, synthetic construct
  misc_feature 1..21: note = Synthetic
  source 1..21: mol_type = other RNA
acgatggcccttggcttggag

SEQ ID NO: 4763 - RNA, 21 nt, synthetic construct
  misc_feature 1..21: note = Synthetic
  source 1..21: mol_type = other RNA
acgatggggaggacaatggac

SEQ ID NO: 4764 - RNA, 21 nt, synthetic construct
  misc_feature 1..21: note = Synthetic
  source 1..21: mol_type = other RNA
acgcagagctggctgcaggtg

SEQ ID NO: 4765 - RNA, 21 nt, synthetic construct
  misc_feature 1..21: note = Synthetic
  source 1..21: mol_type = other RNA
acgcagccaacttcatcgctc

SEQ ID NO: 4766 - RNA, 21 nt, synthetic construct
  misc_feature 1..21: note = Synthetic
  source 1..21: mol_type = other RNA
acgcatttacgtgctccgaaa

SEQ ID NO: 4767 - RNA, 21 nt, synthetic construct
  misc_feature 1..21: note = Synthetic
  source 1..21: mol_type = other RNA
acgccacgtcatcctccagac

SEQ ID NO: 4768 - RNA, 21 nt, synthetic construct
  misc_feature 1..21: note = Synthetic
  source 1..21: mol_type = other RNA
acgccatgaatccctttcctg

SEQ ID NO: 4769 - RNA, 21 nt, synthetic construct
  misc_feature 1..21: note = Synthetic
  source 1..21: mol_type = other RNA
acgcccggctaattttttgta

SEQ ID NO: 4770 - RNA, 21 nt, synthetic construct
  misc_feature 1..21: note = Synthetic
  source 1..21: mol_type = other RNA
acgcccttggtatccgcaaca

SEQ ID NO: 4771 - RNA, 21 nt, synthetic construct
  misc_feature 1..21: note = Synthetic
  source 1..21: mol_type = other RNA
acgccgtgggctctgtcaagc

SEQ ID NO: 4772 - RNA, 21 nt, synthetic construct
  misc_feature 1..21: note = Synthetic
  source 1..21: mol_type = other RNA
acgcgggagtctgacggaggc

SEQ ID NO: 4773 - RNA, 21 nt, synthetic construct
  misc_feature 1..21: note = Synthetic
  source 1..21: mol_type = other RNA
acgctactgggcttcttctca

SEQ ID NO: 4774 - RNA, 21 nt, synthetic construct
  misc_feature 1..21: note = Synthetic
  source 1..21: mol_type = other RNA
acgctctgtcacacagctgcc

SEQ ID NO: 4775 - RNA, 21 nt, synthetic construct
  misc_feature 1..21: note = Synthetic
  source 1..21: mol_type = other RNA
acggaggctgtcactgtctct

SEQ ID NO: 4776 - RNA, 21 nt, synthetic construct
  misc_feature 1..21: note = Synthetic
  source 1..21: mol_type = other RNA
acggagggcgactcgtgtatg

SEQ ID NO: 4777 - RNA, 21 nt, synthetic construct
  misc_feature 1..21: note = Synthetic
  source 1..21: mol_type = other RNA
acggaggtgtcgccacagagc

SEQ ID NO: 4778 - RNA, 21 nt, synthetic construct
  misc_feature 1..21: note = Synthetic
  source 1..21: mol_type = other RNA
acggagtctcgctctgtcgcc

SEQ ID NO: 4779 - RNA, 21 nt, synthetic construct
  misc_feature 1..21: note = Synthetic
  source 1..21: mol_type = other RNA
acggattcagccagatcattt

SEQ ID NO: 4780 - RNA, 21 nt, synthetic construct
  misc_feature 1..21: note = Synthetic
  source 1..21: mol_type = other RNA
acggccaaggagaaggggtgg

SEQ ID NO: 4781 - RNA, 21 nt, synthetic construct
  misc_feature 1..21: note = Synthetic
  source 1..21: mol_type = other RNA
acggccaaggtaaccgggtgt

SEQ ID NO: 4782 - RNA, 21 nt, synthetic construct
  misc_feature 1..21: note = Synthetic
  source 1..21: mol_type = other RNA
acggcccccacagctgaagtc

SEQ ID NO: 4783 - RNA, 21 nt, synthetic construct
  misc_feature 1..21: note = Synthetic
  source 1..21: mol_type = other RNA
acggcgatttcagaaagaacc

SEQ ID NO: 4784 - RNA, 21 nt, synthetic construct
  misc_feature 1..21: note = Synthetic
  source 1..21: mol_type = other RNA
acggctgtggagctgaccttt

SEQ ID NO: 4785 - RNA, 21 nt, synthetic construct
  misc_feature 1..21: note = Synthetic
  source 1..21: mol_type = other RNA
acggctttgaagtcccggtca

SEQ ID NO: 4786 - RNA, 21 nt, synthetic construct
  misc_feature 1..21: note = Synthetic
  source 1..21: mol_type = other RNA
acgggaatggaagtgggtagg

SEQ ID NO: 4787 - RNA, 21 nt, synthetic construct
  misc_feature 1..21: note = Synthetic
  source 1..21: mol_type = other RNA
acgggactccaggcagatgtt

SEQ ID NO: 4788 - RNA, 21 nt, synthetic construct
  misc_feature 1..21: note = Synthetic
  source 1..21: mol_type = other RNA
acgggctttccctggcctggg

SEQ ID NO: 4789 - RNA, 21 nt, synthetic construct
  misc_feature 1..21: note = Synthetic
  source 1..21: mol_type = other RNA
acggggacatcattctcccaa

SEQ ID NO: 4790 - RNA, 21 nt, synthetic construct
  misc_feature 1..21: note = Synthetic
  source 1..21: mol_type = other RNA
acggggttgtcaaagttgatg

SEQ ID NO: 4791 - RNA, 21 nt, synthetic construct
  misc_feature 1..21: note = Synthetic
  source 1..21: mol_type = other RNA
acggggtttcacgtgttagcc

SEQ ID NO: 4792 - RNA, 21 nt, synthetic construct
  misc_feature 1..21: note = Synthetic
  source 1..21: mol_type = other RNA
acggtccagcgcaatttccag

SEQ ID NO: 4793 - RNA, 21 nt, synthetic construct
  misc_feature 1..21: note = Synthetic
  source 1..21: mol_type = other RNA
acggtggagagaaactcaaaa

SEQ ID NO: 4794 - RNA, 21 nt, synthetic construct
  misc_feature 1..21: note = Synthetic
  source 1..21: mol_type = other RNA
acggtggatgtctcctgggtg

SEQ ID NO: 4795 - RNA, 21 nt, synthetic construct
  misc_feature 1..21: note = Synthetic
  source 1..21: mol_type = other RNA
acggtgtcataggaagagacg

SEQ ID NO: 4796 - RNA, 21 nt, synthetic construct
  misc_feature 1..21: note = Synthetic
  source 1..21: mol_type = other RNA
acggttccctgcactgggggg

SEQ ID NO: 4797 - RNA, 21 nt, synthetic construct
  misc_feature 1..21: note = Synthetic
  source 1..21: mol_type = other RNA
acgtaaagacccctacagcgc

SEQ ID NO: 4798 - RNA, 21 nt, synthetic construct
  misc_feature 1..21: note = Synthetic
  source 1..21: mol_type = other RNA
acgtcatcctccagactgacc

SEQ ID NO: 4799 - RNA, 21 nt, synthetic construct
  misc_feature 1..21: note = Synthetic
  source 1..21: mol_type = other RNA
acgtcgcccagagcttggtga

SEQ ID NO: 4800 - RNA, 21 nt, synthetic construct
  misc_feature 1..21: note = Synthetic
  source 1..21: mol_type = other RNA
acgtctcctgggactcatcag

SEQ ID NO: 4801 - RNA, 21 nt, synthetic construct
  misc_feature 1..21: note = Synthetic
  source 1..21: mol_type = other RNA
acgtcttgggggagcacgtct

SEQ ID NO: 4802 - RNA, 21 nt, synthetic construct
  misc_feature 1..21: note = Synthetic
  source 1..21: mol_type = other RNA
acgtcttggggggacagcctt

SEQ ID NO: 4803 - RNA, 21 nt, synthetic construct
  misc_feature 1..21: note = Synthetic
  source 1..21: mol_type = other RNA
acgtgccaccgtacccagctg

SEQ ID NO: 4804 - RNA, 21 nt, synthetic construct
  misc_feature 1..21: note = Synthetic
  source 1..21: mol_type = other RNA
acgtgctccgaaaccagaaag

SEQ ID NO: 4805 - RNA, 21 nt, synthetic construct
  misc_feature 1..21: note = Synthetic
  source 1..21: mol_type = other RNA
acgtggctgaagatctcggct

SEQ ID NO: 4806 - RNA, 21 nt, synthetic construct
  misc_feature 1..21: note = Synthetic
  source 1..21: mol_type = other RNA
acgtgggaacagccgccgttg

SEQ ID NO: 4807 - RNA, 21 nt, synthetic construct
  misc_feature 1..21: note = Synthetic
  source 1..21: mol_type = other RNA
acgtgtcctcacggccaaggt

SEQ ID NO: 4808 - RNA, 21 nt, synthetic construct
  misc_feature 1..21: note = Synthetic
  source 1..21: mol_type = other RNA
acgtgttagccaggatggtct

SEQ ID NO: 4809 - RNA, 21 nt, synthetic construct
  misc_feature 1..21: note = Synthetic
  source 1..21: mol_type = other RNA
acgttcctcaggttggggatg

SEQ ID NO: 4810 - RNA, 21 nt, synthetic construct
  misc_feature 1..21: note = Synthetic
  source 1..21: mol_type = other RNA
acgttgactcctgagtttagg

SEQ ID NO: 4811 - RNA, 21 nt, synthetic construct
  misc_feature 1..21: note = Synthetic
  source 1..21: mol_type = other RNA
acgtttcaacctcgtaaggaa

SEQ ID NO: 4812 - RNA, 21 nt, synthetic construct
  misc_feature 1..21: note = Synthetic
  source 1..21: mol_type = other RNA
acgttttcctcttcacgccct

SEQ ID NO: 4813 - RNA, 21 nt, synthetic construct
  misc_feature 1..21: note = Synthetic
  source 1..21: mol_type = other RNA
actacaggtgcccgccaccac

SEQ ID NO: 4814 - RNA, 21 nt, synthetic construct
  misc_feature 1..21: note = Synthetic
  source 1..21: mol_type = other RNA
actaggtgggcggacataaag

SEQ ID NO: 4815 - RNA, 21 nt, synthetic construct
  misc_feature 1..21: note = Synthetic
  source 1..21: mol_type = other RNA
actatctccaccgtggtgagc

SEQ ID NO: 4816 - RNA, 21 nt, synthetic construct
  misc_feature 1..21: note = Synthetic
  source 1..21: mol_type = other RNA
actatctgtacagggacgcat

SEQ ID NO: 4817 - RNA, 21 nt, synthetic construct
  misc_feature 1..21: note = Synthetic
  source 1..21: mol_type = other RNA
actatgttgcccaggctggaa

SEQ ID NO: 4818 - RNA, 21 nt, synthetic construct
  misc_feature 1..21: note = Synthetic
  source 1..21: mol_type = other RNA
actcaaaacttcctggagaga

SEQ ID NO: 4819 - RNA, 21 nt, synthetic construct
  misc_feature 1..21: note = Synthetic
  source 1..21: mol_type = other RNA
actcaagtgatccagctcagc

SEQ ID NO: 4820 - RNA, 21 nt, synthetic construct
  misc_feature 1..21: note = Synthetic
  source 1..21: mol_type = other RNA
actcagcgctgccatcgcaga

SEQ ID NO: 4821 - RNA, 21 nt, synthetic construct
  misc_feature 1..21: note = Synthetic
  source 1..21: mol_type = other RNA
actcaggctctgcctctggga

SEQ ID NO: 4822 - RNA, 21 nt, synthetic construct
  misc_feature 1..21: note = Synthetic
  source 1..21: mol_type = other RNA
actcatacatacaacggggac

SEQ ID NO: 4823 - RNA, 21 nt, synthetic construct
  misc_feature 1..21: note = Synthetic
  source 1..21: mol_type = other RNA
actcatcagagccatcctggc

SEQ ID NO: 4824 - RNA, 21 nt, synthetic construct
  misc_feature 1..21: note = Synthetic
  source 1..21: mol_type = other RNA
actcatccgagccatcttcgc

SEQ ID NO: 4825 - RNA, 21 nt, synthetic construct
  misc_feature 1..21: note = Synthetic
  source 1..21: mol_type = other RNA
actcatcgatatcgcactctt

SEQ ID NO: 4826 - RNA, 21 nt, synthetic construct
  misc_feature 1..21: note = Synthetic
  source 1..21: mol_type = other RNA
actcatcgatatcttcgcatc

SEQ ID NO: 4827 - RNA, 21 nt, synthetic construct
  misc_feature 1..21: note = Synthetic
  source 1..21: mol_type = other RNA
actccaggcagatgttcacgc

SEQ ID NO: 4828 - RNA, 21 nt, synthetic construct
  misc_feature 1..21: note = Synthetic
  source 1..21: mol_type = other RNA
actcctcttggctgggtgagg

SEQ ID NO: 4829 - RNA, 21 nt, synthetic construct
  misc_feature 1..21: note = Synthetic
  source 1..21: mol_type = other RNA
actcctgaactcaagtgatcc

SEQ ID NO: 4830 - RNA, 21 nt, synthetic construct
  misc_feature 1..21: note = Synthetic
  source 1..21: mol_type = other RNA
actcctgagtttaggggtttg

SEQ ID NO: 4831 - RNA, 21 nt, synthetic construct
  misc_feature 1..21: note = Synthetic
  source 1..21: mol_type = other RNA
actcgaaggccgagcaggggc

SEQ ID NO: 4832 - RNA, 21 nt, synthetic construct
  misc_feature 1..21: note = Synthetic
  source 1..21: mol_type = other RNA
actcgccacttaggcagtgga

SEQ ID NO: 4833 - RNA, 21 nt, synthetic construct
  misc_feature 1..21: note = Synthetic
  source 1..21: mol_type = other RNA
actcgctccggtccagcgtca

SEQ ID NO: 4834 - RNA, 21 nt, synthetic construct
  misc_feature 1..21: note = Synthetic
  source 1..21: mol_type = other RNA
actcgtagccgatcttaaggt

SEQ ID NO: 4835 - RNA, 21 nt, synthetic construct
  misc_feature 1..21: note = Synthetic
  source 1..21: mol_type = other RNA
actcgtcctgggagcacgtct

SEQ ID NO: 4836 - RNA, 21 nt, synthetic construct
  misc_feature 1..21: note = Synthetic
  source 1..21: mol_type = other RNA
actcgtgtatgtcgcggaggc

SEQ ID NO: 4837 - RNA, 21 nt, synthetic construct
  misc_feature 1..21: note = Synthetic
  source 1..21: mol_type = other RNA
actcgtttctttcgcatctgt

SEQ ID NO: 4838 - RNA, 21 nt, synthetic construct
  misc_feature 1..21: note = Synthetic
  source 1..21: mol_type = other RNA
actctgaactgagaaagtgca

SEQ ID NO: 4839 - RNA, 21 nt, synthetic construct
  misc_feature 1..21: note = Synthetic
  source 1..21: mol_type = other RNA
actctttgatgggttcatctg

SEQ ID NO: 4840 - RNA, 21 nt, synthetic construct
  misc_feature 1..21: note = Synthetic
  source 1..21: mol_type = other RNA
actgaaaatggcttcgttgat

SEQ ID NO: 4841 - RNA, 21 nt, synthetic construct
  misc_feature 1..21: note = Synthetic
  source 1..21: mol_type = other RNA
actgaacaaatacagcaacca

SEQ ID NO: 4842 - RNA, 21 nt, synthetic construct
  misc_feature 1..21: note = Synthetic
  source 1..21: mol_type = other RNA
actgaatgttttcagtcacca

SEQ ID NO: 4843 - RNA, 21 nt, synthetic construct
  misc_feature 1..21: note = Synthetic
  source 1..21: mol_type = other RNA
actgaccatcgaggggtagct

SEQ ID NO: 4844 - RNA, 21 nt, synthetic construct
  misc_feature 1..21: note = Synthetic
  source 1..21: mol_type = other RNA
actgaccatctgtctcgaggg

SEQ ID NO: 4845 - RNA, 21 nt, synthetic construct
  misc_feature 1..21: note = Synthetic
  source 1..21: mol_type = other RNA
actgagaaagtgcaaggagac

SEQ ID NO: 4846 - RNA, 21 nt, synthetic construct
  misc_feature 1..21: note = Synthetic
  source 1..21: mol_type = other RNA
actgaggaatgcagcggttga

SEQ ID NO: 4847 - RNA, 21 nt, synthetic construct
  misc_feature 1..21: note = Synthetic
  source 1..21: mol_type = other RNA
actgaggagatctagggtgat

SEQ ID NO: 4848 - RNA, 21 nt, synthetic construct
  misc_feature 1..21: note = Synthetic
  source 1..21: mol_type = other RNA
actgcaacctccacctcctgg

SEQ ID NO: 4849 - RNA, 21 nt, synthetic construct
  misc_feature 1..21: note = Synthetic
  source 1..21: mol_type = other RNA
actgcaagctccgcttcccgg

SEQ ID NO: 4850 - RNA, 21 nt, synthetic construct
  misc_feature 1..21: note = Synthetic
  source 1..21: mol_type = other RNA
actgcagcctcagcctctctt

SEQ ID NO: 4851 - RNA, 21 nt, synthetic construct
  misc_feature 1..21: note = Synthetic
  source 1..21: mol_type = other RNA
actgcagcctcagcctctgtg

SEQ ID NO: 4852 - RNA, 21 nt, synthetic construct
  misc_feature 1..21: note = Synthetic
  source 1..21: mol_type = other RNA
actgcagtccccgccgcggcg

SEQ ID NO: 4853 - RNA, 21 nt, synthetic construct
  misc_feature 1..21: note = Synthetic
  source 1..21: mol_type = other RNA
actgcagtggcgcaatctcgg

SEQ ID NO: 4854 - RNA, 21 nt, synthetic construct
  misc_feature 1..21: note = Synthetic
  source 1..21: mol_type = other RNA
actgccgagagatgcacttcc

SEQ ID NO: 4855 - RNA, 21 nt, synthetic construct
  misc_feature 1..21: note = Synthetic
  source 1..21: mol_type = other RNA
actgccggctgccatggatgc

SEQ ID NO: 4856 - RNA, 21 nt, synthetic construct
  misc_feature 1..21: note = Synthetic
  source 1..21: mol_type = other RNA
actgcgcccggcctcaccgtg

SEQ ID NO: 4857 - RNA, 21 nt, synthetic construct
  misc_feature 1..21: note = Synthetic
  source 1..21: mol_type = other RNA
actgcggactgcagtggcgca

SEQ ID NO: 4858 - RNA, 21 nt, synthetic construct
  misc_feature 1..21: note = Synthetic
  source 1..21: mol_type = other RNA
actggaactcgtttctttcgc

SEQ ID NO: 4859 - RNA, 21 nt, synthetic construct
  misc_feature 1..21: note = Synthetic
  source 1..21: mol_type = other RNA
actggaagctggcgggaccac

SEQ ID NO: 4860 - RNA, 21 nt, synthetic construct
  misc_feature 1..21: note = Synthetic
  source 1..21: mol_type = other RNA
actggaattcgtcagggcgac

SEQ ID NO: 4861 - RNA, 21 nt, synthetic construct
  misc_feature 1..21: note = Synthetic
  source 1..21: mol_type = other RNA
actggaggatttatttatttt

SEQ ID NO: 4862 - RNA, 21 nt, synthetic construct
  misc_feature 1..21: note = Synthetic
  source 1..21: mol_type = other RNA
actggcacttgtagccaccct

SEQ ID NO: 4863 - RNA, 21 nt, synthetic construct
  misc_feature 1..21: note = Synthetic
  source 1..21: mol_type = other RNA
actggcagccgccattgctca

SEQ ID NO: 4864 - RNA, 21 nt, synthetic construct
  misc_feature 1..21: note = Synthetic
  source 1..21: mol_type = other RNA
actgggcttcttctcatttcc

SEQ ID NO: 4865 - RNA, 21 nt, synthetic construct
  misc_feature 1..21: note = Synthetic
  source 1..21: mol_type = other RNA
actgggggggacacagtgttt

SEQ ID NO: 4866 - RNA, 21 nt, synthetic construct
  misc_feature 1..21: note = Synthetic
  source 1..21: mol_type = other RNA
actgggtgggtcatgattcgg

SEQ ID NO: 4867 - RNA, 21 nt, synthetic construct
  misc_feature 1..21: note = Synthetic
  source 1..21: mol_type = other RNA
actgtagggagaggcacgctc

SEQ ID NO: 4868 - RNA, 21 nt, synthetic construct
  misc_feature 1..21: note = Synthetic
  source 1..21: mol_type = other RNA
actgtccccttggaacacgta

SEQ ID NO: 4869 - RNA, 21 nt, synthetic construct
  misc_feature 1..21: note = Synthetic
  source 1..21: mol_type = other RNA
actgtccgaagcctgttctgc

SEQ ID NO: 4870 - RNA, 21 nt, synthetic construct
  misc_feature 1..21: note = Synthetic
  source 1..21: mol_type = other RNA
actgtctctccggacatcagt

SEQ ID NO: 4871 - RNA, 21 nt, synthetic construct
  misc_feature 1..21: note = Synthetic
  source 1..21: mol_type = other RNA
acttaataaatattaagggtg

SEQ ID NO: 4872 - RNA, 21 nt, synthetic construct
  misc_feature 1..21: note = Synthetic
  source 1..21: mol_type = other RNA
acttaggcagtggaactcgaa

SEQ ID NO: 4873 - RNA, 21 nt, synthetic construct
  misc_feature 1..21: note = Synthetic
  source 1..21: mol_type = other RNA
acttcatcgctcatgtccttg

SEQ ID NO: 4874 - RNA, 21 nt, synthetic construct
  misc_feature 1..21: note = Synthetic
  source 1..21: mol_type = other RNA
acttcccatcgtggcagcgaa

SEQ ID NO: 4875 - RNA, 21 nt, synthetic construct
  misc_feature 1..21: note = Synthetic
  source 1..21: mol_type = other RNA
acttcctggagagaaatggag

SEQ ID NO: 4876 - RNA, 21 nt, synthetic construct
  misc_feature 1..21: note = Synthetic
  source 1..21: mol_type = other RNA
acttcgccaggagggcccagg

SEQ ID NO: 4877 - RNA, 21 nt, synthetic construct
  misc_feature 1..21: note = Synthetic
  source 1..21: mol_type = other RNA
acttgaacttgttgggtccct

SEQ ID NO: 4878 - RNA, 21 nt, synthetic construct
  misc_feature 1..21: note = Synthetic
  source 1..21: mol_type = other RNA
acttgatcggggctggtgggg

SEQ ID NO: 4879 - RNA, 21 nt, synthetic construct
  misc_feature 1..21: note = Synthetic
  source 1..21: mol_type = other RNA
acttgcttctctgggcctgac

SEQ ID NO: 4880 - RNA, 21 nt, synthetic construct
  misc_feature 1..21: note = Synthetic
  source 1..21: mol_type = other RNA
acttggccatcgcacctccag

SEQ ID NO: 4881 - RNA, 21 nt, synthetic construct
  misc_feature 1..21: note = Synthetic
  source 1..21: mol_type = other RNA
acttgggcgagtgggggttga

SEQ ID NO: 4882 - RNA, 21 nt, synthetic construct
  misc_feature 1..21: note = Synthetic
  source 1..21: mol_type = other RNA
acttgtagccaccctccaggt

SEQ ID NO: 4883 - RNA, 21 nt, synthetic construct
  misc_feature 1..21: note = Synthetic
  source 1..21: mol_type = other RNA
acttgtaggagatgcatttcc

SEQ ID NO: 4884 - RNA, 21 nt, synthetic construct
  misc_feature 1..21: note = Synthetic
  source 1..21: mol_type = other RNA
acttgtcgtcgcctttgtgac

SEQ ID NO: 4885 - RNA, 21 nt, synthetic construct
  misc_feature 1..21: note = Synthetic
  source 1..21: mol_type = other RNA
acttgttgggtccctcgcaga

SEQ ID NO: 4886 - RNA, 21 nt, synthetic construct
  misc_feature 1..21: note = Synthetic
  source 1..21: mol_type = other RNA
actttgtccagggtgatgcat

SEQ ID NO: 4887 - RNA, 21 nt, synthetic construct
  misc_feature 1..21: note = Synthetic
  source 1..21: mol_type = other RNA
actttgtcctcaaagacggcc

SEQ ID NO: 4888 - RNA, 21 nt, synthetic construct
  misc_feature 1..21: note = Synthetic
  source 1..21: mol_type = other RNA
actttttggtttttgtagaga

SEQ ID NO: 4889 - RNA, 21 nt, synthetic construct
  misc_feature 1..21: note = Synthetic
  source 1..21: mol_type = other RNA
agaaaacagtgcaaaataata

SEQ ID NO: 4890 - RNA, 21 nt, synthetic construct
  misc_feature 1..21: note = Synthetic
  source 1..21: mol_type = other RNA
agaaaccaaaatcccaaccca

SEQ ID NO: 4891 - RNA, 21 nt, synthetic construct
  misc_feature 1..21: note = Synthetic
  source 1..21: mol_type = other RNA
agaaactcaaaacttcctgga

SEQ ID NO: 4892 - RNA, 21 nt, synthetic construct
  misc_feature 1..21: note = Synthetic
  source 1..21: mol_type = other RNA
agaaagaacctgaagtcccgt

SEQ ID NO: 4893 - RNA, 21 nt, synthetic construct
  misc_feature 1..21: note = Synthetic
  source 1..21: mol_type = other RNA
agaaaggcttatcacggttcc

SEQ ID NO: 4894 - RNA, 21 nt, synthetic construct
  misc_feature 1..21: note = Synthetic
  source 1..21: mol_type = other RNA
agaaagtgcaaggagaccacg

SEQ ID NO: 4895 - RNA, 21 nt, synthetic construct
  misc_feature 1..21: note = Synthetic
  source 1..21: mol_type = other RNA
agaaatggaggtgtcatcctg

SEQ ID NO: 4896 - RNA, 21 nt, synthetic construct
  misc_feature 1..21: note = Synthetic
  source 1..21: mol_type = other RNA
agaaatttaattgatcacagt

SEQ ID NO: 4897 - RNA, 21 nt, synthetic construct
  misc_feature 1..21: note = Synthetic
  source 1..21: mol_type = other RNA
agaaccatatcctctggggac

SEQ ID NO: 4898 - RNA, 21 nt, synthetic construct
  misc_feature 1..21: note = Synthetic
  source 1..21: mol_type = other RNA
agaacctgaagtcccgtcaaa

SEQ ID NO: 4899 - RNA, 21 nt, synthetic construct
  misc_feature 1..21: note = Synthetic
  source 1..21: mol_type = other RNA
agaactgaggaatgcagcggt

SEQ ID NO: 4900 - RNA, 21 nt, synthetic construct
  misc_feature 1..21: note = Synthetic
  source 1..21: mol_type = other RNA
agaagaggcatttcagaggca

SEQ ID NO: 4901 - RNA, 21 nt, synthetic construct
  misc_feature 1..21: note = Synthetic
  source 1..21: mol_type = other RNA
agaagaggtaaacacgttgac

SEQ ID NO: 4902 - RNA, 21 nt, synthetic construct
  misc_feature 1..21: note = Synthetic
  source 1..21: mol_type = other RNA
agaagaggtaggcgatggagc

SEQ ID NO: 4903 - RNA, 21 nt, synthetic construct
  misc_feature 1..21: note = Synthetic
  source 1..21: mol_type = other RNA
agaagccactcatacatacaa

SEQ ID NO: 4904 - RNA, 21 nt, synthetic construct
  misc_feature 1..21: note = Synthetic
  source 1..21: mol_type = other RNA
agaaggaagacccccaggcaa

SEQ ID NO: 4905 - RNA, 21 nt, synthetic construct
  misc_feature 1..21: note = Synthetic
  source 1..21: mol_type = other RNA
agaaggggtgggccagcctct

SEQ ID NO: 4906 - RNA, 21 nt, synthetic construct
  misc_feature 1..21: note = Synthetic
  source 1..21: mol_type = other RNA
agaagtggaagcactaggtgg

SEQ ID NO: 4907 - RNA, 21 nt, synthetic construct
  misc_feature 1..21: note = Synthetic
  source 1..21: mol_type = other RNA
agaatagtcactgaacaaata

SEQ ID NO: 4908 - RNA, 21 nt, synthetic construct
  misc_feature 1..21: note = Synthetic
  source 1..21: mol_type = other RNA
agacaagcacgtctcctggga

SEQ ID NO: 4909 - RNA, 21 nt, synthetic construct
  misc_feature 1..21: note = Synthetic
  source 1..21: mol_type = other RNA
agacactgggtgggtcatgat

SEQ ID NO: 4910 - RNA, 21 nt, synthetic construct
  misc_feature 1..21: note = Synthetic
  source 1..21: mol_type = other RNA
agacagccttgctcgtctgag

SEQ ID NO: 4911 - RNA, 21 nt, synthetic construct
  misc_feature 1..21: note = Synthetic
  source 1..21: mol_type = other RNA
agacagtgcccaggacagagt

SEQ ID NO: 4912 - RNA, 21 nt, synthetic construct
  misc_feature 1..21: note = Synthetic
  source 1..21: mol_type = other RNA
agacattcaggctacaaaaac

SEQ ID NO: 4913 - RNA, 21 nt, synthetic construct
  misc_feature 1..21: note = Synthetic
  source 1..21: mol_type = other RNA
agacattgtcactatctccac

SEQ ID NO: 4914 - RNA, 21 nt, synthetic construct
  misc_feature 1..21: note = Synthetic
  source 1..21: mol_type = other RNA
agaccaaggaggggcggggag

SEQ ID NO: 4915 - RNA, 21 nt, synthetic construct
  misc_feature 1..21: note = Synthetic
  source 1..21: mol_type = other RNA
agaccacgggaatggaagtgg

SEQ ID NO: 4916 - RNA, 21 nt, synthetic construct
  misc_feature 1..21: note = Synthetic
  source 1..21: mol_type = other RNA
agaccagagacccagctccgt

SEQ ID NO: 4917 - RNA, 21 nt, synthetic construct
  misc_feature 1..21: note = Synthetic
  source 1..21: mol_type = other RNA
agaccagtagattctattgct

SEQ ID NO: 4918 - RNA, 21 nt, synthetic construct
  misc_feature 1..21: note = Synthetic
  source 1..21: mol_type = other RNA
agacccacttgtaggagatgc

SEQ ID NO: 4919 - RNA, 21 nt, synthetic construct
  misc_feature 1..21: note = Synthetic
  source 1..21: mol_type = other RNA
agacccagctccgtggcgatg

SEQ ID NO: 4920 - RNA, 21 nt, synthetic construct
  misc_feature 1..21: note = Synthetic
  source 1..21: mol_type = other RNA
agacccccaggcaaaggaaga

SEQ ID NO: 4921 - RNA, 21 nt, synthetic construct
  misc_feature 1..21: note = Synthetic
  source 1..21: mol_type = other RNA
agacccctacagcgctgcggc

SEQ ID NO: 4922 - RNA, 21 nt, synthetic construct
  misc_feature 1..21: note = Synthetic
  source 1..21: mol_type = other RNA
agacgaactgccgagagatgc

SEQ ID NO: 4923 - RNA, 21 nt, synthetic construct
  misc_feature 1..21: note = Synthetic
  source 1..21: mol_type = other RNA
agacgacaatggcagttctcg

SEQ ID NO: 4924 - RNA, 21 nt, synthetic construct
  misc_feature 1..21: note = Synthetic
  source 1..21: mol_type = other RNA
agacgaggagcacgatgggga

SEQ ID NO: 4925 - RNA, 21 nt, synthetic construct
  misc_feature 1..21: note = Synthetic
  source 1..21: mol_type = other RNA
agacgaggagcactgtaggga

SEQ ID NO: 4926 - RNA, 21 nt, synthetic construct
  misc_feature 1..21: note = Synthetic
  source 1..21: mol_type = other RNA
agacgccgtgggctctgtcaa

SEQ ID NO: 4927 - RNA, 21 nt, synthetic construct
  misc_feature 1..21: note = Synthetic
  source 1..21: mol_type = other RNA
agacggagtctcgctctgtcg

SEQ ID NO: 4928 - RNA, 21 nt, synthetic construct
  misc_feature 1..21: note = Synthetic
  source 1..21: mol_type = other RNA
agacggccaaggagaaggggt

SEQ ID NO: 4929 - RNA, 21 nt, synthetic construct
  misc_feature 1..21: note = Synthetic
  source 1..21: mol_type = other RNA
agacggggttgtcaaagttga

SEQ ID NO: 4930 - RNA, 21 nt, synthetic construct
  misc_feature 1..21: note = Synthetic
  source 1..21: mol_type = other RNA
agacggggtttcacgtgttag

SEQ ID NO: 4931 - RNA, 21 nt, synthetic construct
  misc_feature 1..21: note = Synthetic
  source 1..21: mol_type = other RNA
agacgtgggaacagccgccgt

SEQ ID NO: 4932 - RNA, 21 nt, synthetic construct
  misc_feature 1..21: note = Synthetic
  source 1..21: mol_type = other RNA
agactgaccatcgaggggtag

SEQ ID NO: 4933 - RNA, 21 nt, synthetic construct
  misc_feature 1..21: note = Synthetic
  source 1..21: mol_type = other RNA
agactgaccatctgtctcgag

SEQ ID NO: 4934 - RNA, 21 nt, synthetic construct
  misc_feature 1..21: note = Synthetic
  source 1..21: mol_type = other RNA
agactgcggactgcagtggcg

SEQ ID NO: 4935 - RNA, 21 nt, synthetic construct
  misc_feature 1..21: note = Synthetic
  source 1..21: mol_type = other RNA
agactggaggatttatttatt

SEQ ID NO: 4936 - RNA, 21 nt, synthetic construct
  misc_feature 1..21: note = Synthetic
  source 1..21: mol_type = other RNA
agactttgtccagggtgatgc

SEQ ID NO: 4937 - RNA, 21 nt, synthetic construct
  misc_feature 1..21: note = Synthetic
  source 1..21: mol_type = other RNA
agagaaactcaaaacttcctg

SEQ ID NO: 4938 - RNA, 21 nt, synthetic construct
  misc_feature 1..21: note = Synthetic
  source 1..21: mol_type = other RNA
agagaaatggaggtgtcatcc

SEQ ID NO: 4939 - RNA, 21 nt, synthetic construct
  misc_feature 1..21: note = Synthetic
  source 1..21: mol_type = other RNA
agagaaccatatcctctgggg

SEQ ID NO: 4940 - RNA, 21 nt, synthetic construct
  misc_feature 1..21: note = Synthetic
  source 1..21: mol_type = other RNA
agagacagtgcccaggacaga

SEQ ID NO: 4941 - RNA, 21 nt, synthetic construct
  misc_feature 1..21: note = Synthetic
  source 1..21: mol_type = other RNA
agagacccagctccgtggcga

SEQ ID NO: 4942 - RNA, 21 nt, synthetic construct
  misc_feature 1..21: note = Synthetic
  source 1..21: mol_type = other RNA
agagacgccgtgggctctgtc

SEQ ID NO: 4943 - RNA, 21 nt, synthetic construct
  misc_feature 1..21: note = Synthetic
  source 1..21: mol_type = other RNA
agagacggggtttcacgtgtt

SEQ ID NO: 4944 - RNA, 21 nt, synthetic construct
  misc_feature 1..21: note = Synthetic
  source 1..21: mol_type = other RNA
agagatgcacttcccatcgtg

SEQ ID NO: 4945 - RNA, 21 nt, synthetic construct
  misc_feature 1..21: note = Synthetic
  source 1..21: mol_type = other RNA
agagatgggatctcgctttgt

SEQ ID NO: 4946 - RNA, 21 nt, synthetic construct
  misc_feature 1..21: note = Synthetic
  source 1..21: mol_type = other RNA
agagatggggtcttactatgt

SEQ ID NO: 4947 - RNA, 21 nt, synthetic construct
  misc_feature 1..21: note = Synthetic
  source 1..21: mol_type = other RNA
agagattggtggatgaggcag

SEQ ID NO: 4948 - RNA, 21 nt, synthetic construct
  misc_feature 1..21: note = Synthetic
  source 1..21: mol_type = other RNA
agagcacagcggaaaccgggg

SEQ ID NO: 4949 - RNA, 21 nt, synthetic construct
  misc_feature 1..21: note = Synthetic
  source 1..21: mol_type = other RNA
agagcactggaattcgtcagg

SEQ ID NO: 4950 - RNA, 21 nt, synthetic construct
  misc_feature 1..21: note = Synthetic
  source 1..21: mol_type = other RNA
agagccatcctggcactcagc

SEQ ID NO: 4951 - RNA, 21 nt, synthetic construct
  misc_feature 1..21: note = Synthetic
  source 1..21: mol_type = other RNA
agagccctcacgctactgggc

SEQ ID NO: 4952 - RNA, 21 nt, synthetic construct
  misc_feature 1..21: note = Synthetic
  source 1..21: mol_type = other RNA
agagcgaccacgttcctcagg

SEQ ID NO: 4953 - RNA, 21 nt, synthetic construct
  misc_feature 1..21: note = Synthetic
  source 1..21: mol_type = other RNA
agagctggctgcaggtgtcgg

SEQ ID NO: 4954 - RNA, 21 nt, synthetic construct
  misc_feature 1..21: note = Synthetic
  source 1..21: mol_type = other RNA
agagcttggtgagacattgtc

SEQ ID NO: 4955 - RNA, 21 nt, synthetic construct
  misc_feature 1..21: note = Synthetic
  source 1..21: mol_type = other RNA
agaggcaataaccccctacac

SEQ ID NO: 4956 - RNA, 21 nt, synthetic construct
  misc_feature 1..21: note = Synthetic
  source 1..21: mol_type = other RNA
agaggcacgctctgtcacaca

SEQ ID NO: 4957 - RNA, 21 nt, synthetic construct
  misc_feature 1..21: note = Synthetic
  source 1..21: mol_type = other RNA
agaggcatttcagaggcaata

SEQ ID NO: 4958 - RNA, 21 nt, synthetic construct
  misc_feature 1..21: note = Synthetic
  source 1..21: mol_type = other RNA
agaggccatgggctgctgatg

SEQ ID NO: 4959 - RNA, 21 nt, synthetic construct
  misc_feature 1..21: note = Synthetic
  source 1..21: mol_type = other RNA
agaggcggccactgaggagat

SEQ ID NO: 4960 - RNA, 21 nt, synthetic construct
  misc_feature 1..21: note = Synthetic
  source 1..21: mol_type = other RNA
agaggtaaacacgttgactcc

SEQ ID NO: 4961 - RNA, 21 nt, synthetic construct
  misc_feature 1..21: note = Synthetic
  source 1..21: mol_type = other RNA
agaggtaggcgatggagccca

SEQ ID NO: 4962 - RNA, 21 nt, synthetic construct
  misc_feature 1..21: note = Synthetic
  source 1..21: mol_type = other RNA
agagtcggtccagtagatgtt

SEQ ID NO: 4963 - RNA, 21 nt, synthetic construct
  misc_feature 1..21: note = Synthetic
  source 1..21: mol_type = other RNA
agagtgtcacattaacgcagc

SEQ ID NO: 4964 - RNA, 21 nt, synthetic construct
  misc_feature 1..21: note = Synthetic
  source 1..21: mol_type = other RNA
agagtgtcagacagccttgct

SEQ ID NO: 4965 - RNA, 21 nt, synthetic construct
  misc_feature 1..21: note = Synthetic
  source 1..21: mol_type = other RNA
agatactggcagccgccattg

SEQ ID NO: 4966 - RNA, 21 nt, synthetic construct
  misc_feature 1..21: note = Synthetic
  source 1..21: mol_type = other RNA
agatcattctctgggacaggt

SEQ ID NO: 4967 - RNA, 21 nt, synthetic construct
  misc_feature 1..21: note = Synthetic
  source 1..21: mol_type = other RNA
agatcatttccgacgccatga

SEQ ID NO: 4968 - RNA, 21 nt, synthetic construct
  misc_feature 1..21: note = Synthetic
  source 1..21: mol_type = other RNA
agatctagggtgatgccattg

SEQ ID NO: 4969 - RNA, 21 nt, synthetic construct
  misc_feature 1..21: note = Synthetic
  source 1..21: mol_type = other RNA
agatctcggctgcagaccaag

SEQ ID NO: 4970 - RNA, 21 nt, synthetic construct
  misc_feature 1..21: note = Synthetic
  source 1..21: mol_type = other RNA
agatgaataaatatataaaac

SEQ ID NO: 4971 - RNA, 21 nt, synthetic construct
  misc_feature 1..21: note = Synthetic
  source 1..21: mol_type = other RNA
agatgcacttcccatcgtggc

SEQ ID NO: 4972 - RNA, 21 nt, synthetic construct
  misc_feature 1..21: note = Synthetic
  source 1..21: mol_type = other RNA
agatgcatttcccgtcttggc

SEQ ID NO: 4973 - RNA, 21 nt, synthetic construct
  misc_feature 1..21: note = Synthetic
  source 1..21: mol_type = other RNA
agatggagtgaagtttggagt

SEQ ID NO: 4974 - RNA, 21 nt, synthetic construct
  misc_feature 1..21: note = Synthetic
  source 1..21: mol_type = other RNA
agatgggatctcgctttgttg

SEQ ID NO: 4975 - RNA, 21 nt, synthetic construct
  misc_feature 1..21: note = Synthetic
  source 1..21: mol_type = other RNA
agatggggtcttactatgttg

SEQ ID NO: 4976 - RNA, 21 nt, synthetic construct
  misc_feature 1..21: note = Synthetic
  source 1..21: mol_type = other RNA
agatggtcttccggttgcccc

SEQ ID NO: 4977 - RNA, 21 nt, synthetic construct
  misc_feature 1..21: note = Synthetic
  source 1..21: mol_type = other RNA
agatgtccacaccattcaggc

SEQ ID NO: 4978 - RNA, 21 nt, synthetic construct
  misc_feature 1..21: note = Synthetic
  source 1..21: mol_type = other RNA
agatgttcacgccacgtcatc

SEQ ID NO: 4979 - RNA, 21 nt, synthetic construct
  misc_feature 1..21: note = Synthetic
  source 1..21: mol_type = other RNA
agatgttgctgtggatccagt

SEQ ID NO: 4980 - RNA, 21 nt, synthetic construct
  misc_feature 1..21: note = Synthetic
  source 1..21: mol_type = other RNA
agattctattgctggccacct

SEQ ID NO: 4981 - RNA, 21 nt, synthetic construct
  misc_feature 1..21: note = Synthetic
  source 1..21: mol_type = other RNA
agattctgaggcaacgtttca

SEQ ID NO: 4982 - RNA, 21 nt, synthetic construct
  misc_feature 1..21: note = Synthetic
  source 1..21: mol_type = other RNA
agattggggaagtgaatggct

SEQ ID NO: 4983 - RNA, 21 nt, synthetic construct
  misc_feature 1..21: note = Synthetic
  source 1..21: mol_type = other RNA
agattggtggatgaggcaggg

SEQ ID NO: 4984 - RNA, 21 nt, synthetic construct
  misc_feature 1..21: note = Synthetic
  source 1..21: mol_type = other RNA
agatttgtccttgcagtcggg

SEQ ID NO: 4985 - RNA, 21 nt, synthetic construct
  misc_feature 1..21: note = Synthetic
  source 1..21: mol_type = other RNA
agattttatatatatgtgtgt

SEQ ID NO: 4986 - RNA, 21 nt, synthetic construct
  misc_feature 1..21: note = Synthetic
  source 1..21: mol_type = other RNA
agcaaccagggtttgcaaaaa

SEQ ID NO: 4987 - RNA, 21 nt, synthetic construct
  misc_feature 1..21: note = Synthetic
  source 1..21: mol_type = other RNA
agcaacgtcgcccagagcttg

SEQ ID NO: 4988 - RNA, 21 nt, synthetic construct
  misc_feature 1..21: note = Synthetic
  source 1..21: mol_type = other RNA
agcaaggcgacggtccagcgc

SEQ ID NO: 4989 - RNA, 21 nt, synthetic construct
  misc_feature 1..21: note = Synthetic
  source 1..21: mol_type = other RNA
agcaaggcttgcatagaagag

SEQ ID NO: 4990 - RNA, 21 nt, synthetic construct
  misc_feature 1..21: note = Synthetic
  source 1..21: mol_type = other RNA
agcacagcggaaaccggggac

SEQ ID NO: 4991 - RNA, 21 nt, synthetic construct
  misc_feature 1..21: note = Synthetic
  source 1..21: mol_type = other RNA
agcaccgggcaggaggcctcg

SEQ ID NO: 4992 - RNA, 21 nt, synthetic construct
  misc_feature 1..21: note = Synthetic
  source 1..21: mol_type = other RNA
agcacgatggggaggacaatg

SEQ ID NO: 4993 - RNA, 21 nt, synthetic construct
  misc_feature 1..21: note = Synthetic
  source 1..21: mol_type = other RNA
agcacgtctcctgggactcat

SEQ ID NO: 4994 - RNA, 21 nt, synthetic construct
  misc_feature 1..21: note = Synthetic
  source 1..21: mol_type = other RNA
agcacgtcttgggggagcacg

SEQ ID NO: 4995 - RNA, 21 nt, synthetic construct
  misc_feature 1..21: note = Synthetic
  source 1..21: mol_type = other RNA
agcacgtcttggggggacagc

SEQ ID NO: 4996 - RNA, 21 nt, synthetic construct
  misc_feature 1..21: note = Synthetic
  source 1..21: mol_type = other RNA
agcactaggtgggcggacata

SEQ ID NO: 4997 - RNA, 21 nt, synthetic construct
  misc_feature 1..21: note = Synthetic
  source 1..21: mol_type = other RNA
agcactggaattcgtcagggc

SEQ ID NO: 4998 - RNA, 21 nt, synthetic construct
  misc_feature 1..21: note = Synthetic
  source 1..21: mol_type = other RNA
agcactgtagggagaggcacg

SEQ ID NO: 4999 - RNA, 21 nt, synthetic construct
  misc_feature 1..21: note = Synthetic
  source 1..21: mol_type = other RNA
agcagcatgccgtccgggcag

SEQ ID NO: 5000 - RNA, 21 nt, synthetic construct
  misc_feature 1..21: note = Synthetic
  source 1..21: mol_type = other RNA
agcaggggctactgtcccctt

SEQ ID NO: 5001 - RNA, 21 nt, synthetic construct
  misc_feature 1..21: note = Synthetic
  source 1..21: mol_type = other RNA
agcagtcccggtctgagtcac

SEQ ID NO: 5002 - RNA, 21 nt, synthetic construct
  misc_feature 1..21: note = Synthetic
  source 1..21: mol_type = other RNA
agcagtggcataatcatagct

SEQ ID NO: 5003 - RNA, 21 nt, synthetic construct
  misc_feature 1..21: note = Synthetic
  source 1..21: mol_type = other RNA
agcatgccgtccgggcaggcg

SEQ ID NO: 5004 - RNA, 21 nt, synthetic construct
  misc_feature 1..21: note = Synthetic
  source 1..21: mol_type = other RNA
agcattcgttggtcccgcact

SEQ ID NO: 5005 - RNA, 21 nt, synthetic construct
  misc_feature 1..21: note = Synthetic
  source 1..21: mol_type = other RNA
agccaacaagttgacatcgga

SEQ ID NO: 5006 - RNA, 21 nt, synthetic construct
  misc_feature 1..21: note = Synthetic
  source 1..21: mol_type = other RNA
agccaacttcatcgctcatgt

SEQ ID NO: 5007 - RNA, 21 nt, synthetic construct
  misc_feature 1..21: note = Synthetic
  source 1..21: mol_type = other RNA
agccacacctgggtgcaggcc

SEQ ID NO: 5008 - RNA, 21 nt, synthetic construct
  misc_feature 1..21: note = Synthetic
  source 1..21: mol_type = other RNA
agccaccctccaggttcacgc

SEQ ID NO: 5009 - RNA, 21 nt, synthetic construct
  misc_feature 1..21: note = Synthetic
  source 1..21: mol_type = other RNA
agccactcatacatacaacgg

SEQ ID NO: 5010 - RNA, 21 nt, synthetic construct
  misc_feature 1..21: note = Synthetic
  source 1..21: mol_type = other RNA
agccactgcgcccggcctcac

SEQ ID NO: 5011 - RNA, 21 nt, synthetic construct
  misc_feature 1..21: note = Synthetic
  source 1..21: mol_type = other RNA
agccacttgcttctctgggcc

SEQ ID NO: 5012 - RNA, 21 nt, synthetic construct
  misc_feature 1..21: note = Synthetic
  source 1..21: mol_type = other RNA
agccagatcatttccgacgcc

SEQ ID NO: 5013 - RNA, 21 nt, synthetic construct
  misc_feature 1..21: note = Synthetic
  source 1..21: mol_type = other RNA
agccagcccgtcgggggcctg

SEQ ID NO: 5014 - RNA, 21 nt, synthetic construct
  misc_feature 1..21: note = Synthetic
  source 1..21: mol_type = other RNA
agccaggatggtctcgatctc

SEQ ID NO: 5015 - RNA, 21 nt, synthetic construct
  misc_feature 1..21: note = Synthetic
  source 1..21: mol_type = other RNA
agccatcctggcactcagcgc

SEQ ID NO: 5016 - RNA, 21 nt, synthetic construct
  misc_feature 1..21: note = Synthetic
  source 1..21: mol_type = other RNA
agccatcttcgcagtcggggt

SEQ ID NO: 5017 - RNA, 21 nt, synthetic construct
  misc_feature 1..21: note = Synthetic
  source 1..21: mol_type = other RNA
agccatgaacaggatccacca

SEQ ID NO: 5018 - RNA, 21 nt, synthetic construct
  misc_feature 1..21: note = Synthetic
  source 1..21: mol_type = other RNA
agccatgttgcagactttgtc

SEQ ID NO: 5019 - RNA, 21 nt, synthetic construct
  misc_feature 1..21: note = Synthetic
  source 1..21: mol_type = other RNA
agccattgcatgggcactgtc

SEQ ID NO: 5020 - RNA, 21 nt, synthetic construct
  misc_feature 1..21: note = Synthetic
  source 1..21: mol_type = other RNA
agcccacagccttgcaggcct

SEQ ID NO: 5021 - RNA, 21 nt, synthetic construct
  misc_feature 1..21: note = Synthetic
  source 1..21: mol_type = other RNA
agcccaggggtggccccaggc

SEQ ID NO: 5022 - RNA, 21 nt, synthetic construct
  misc_feature 1..21: note = Synthetic
  source 1..21: mol_type = other RNA
agccccagggccccatgctcg

SEQ ID NO: 5023 - RNA, 21 nt, synthetic construct
  misc_feature 1..21: note = Synthetic
  source 1..21: mol_type = other RNA
agcccgtcgggggcctggatg

SEQ ID NO: 5024 - RNA, 21 nt, synthetic construct
  misc_feature 1..21: note = Synthetic
  source 1..21: mol_type = other RNA
agccctcacgctactgggctt

SEQ ID NO: 5025 - RNA, 21 nt, synthetic construct
  misc_feature 1..21: note = Synthetic
  source 1..21: mol_type = other RNA
agccgatcttaaggtcattgc

SEQ ID NO: 5026 - RNA, 21 nt, synthetic construct
  misc_feature 1..21: note = Synthetic
  source 1..21: mol_type = other RNA
agccgccagttcttccataga

SEQ ID NO: 5027 - RNA, 21 nt, synthetic construct
  misc_feature 1..21: note = Synthetic
  source 1..21: mol_type = other RNA
agccgccattgctcagggtgg

SEQ ID NO: 5028 - RNA, 21 nt, synthetic construct
  misc_feature 1..21: note = Synthetic
  source 1..21: mol_type = other RNA
agccgccgttgttgtccaagc

SEQ ID NO: 5029 - RNA, 21 nt, synthetic construct
  misc_feature 1..21: note = Synthetic
  source 1..21: mol_type = other RNA
agccgggaggtgtcgggaaca

SEQ ID NO: 5030 - RNA, 21 nt, synthetic construct
  misc_feature 1..21: note = Synthetic
  source 1..21: mol_type = other RNA
agccgtccaagcagtcccggt

SEQ ID NO: 5031 - RNA, 21 nt, synthetic construct
  misc_feature 1..21: note = Synthetic
  source 1..21: mol_type = other RNA
agccgtcctggttgtggcaaa

SEQ ID NO: 5032 - RNA, 21 nt, synthetic construct
  misc_feature 1..21: note = Synthetic
  source 1..21: mol_type = other RNA
agccgtcggggcacaggcact

SEQ ID NO: 5033 - RNA, 21 nt, synthetic construct
  misc_feature 1..21: note = Synthetic
  source 1..21: mol_type = other RNA
agccgttctccctgaataacg

SEQ ID NO: 5034 - RNA, 21 nt, synthetic construct
  misc_feature 1..21: note = Synthetic
  source 1..21: mol_type = other RNA
agccgttgtcgcagtccactt

SEQ ID NO: 5035 - RNA, 21 nt, synthetic construct
  misc_feature 1..21: note = Synthetic
  source 1..21: mol_type = other RNA
agcctcaaatgcctgagctca

SEQ ID NO: 5036 - RNA, 21 nt, synthetic construct
  misc_feature 1..21: note = Synthetic
  source 1..21: mol_type = other RNA
agcctcagcctctcttggctg

SEQ ID NO: 5037 - RNA, 21 nt, synthetic construct
  misc_feature 1..21: note = Synthetic
  source 1..21: mol_type = other RNA
agcctcagcctctgtgaggca

SEQ ID NO: 5038 - RNA, 21 nt, synthetic construct
  misc_feature 1..21: note = Synthetic
  source 1..21: mol_type = other RNA
agcctcccaaagtgctgggat

SEQ ID NO: 5039 - RNA, 21 nt, synthetic construct
  misc_feature 1..21: note = Synthetic
  source 1..21: mol_type = other RNA
agcctcccaagtagctgggat

SEQ ID NO: 5040 - RNA, 21 nt, synthetic construct
  misc_feature 1..21: note = Synthetic
  source 1..21: mol_type = other RNA
agcctcccgagtagctgggac

SEQ ID NO: 5041 - RNA, 21 nt, synthetic construct
  misc_feature 1..21: note = Synthetic
  source 1..21: mol_type = other RNA
agcctcgccatgcctggccag

SEQ ID NO: 5042 - RNA, 21 nt, synthetic construct
  misc_feature 1..21: note = Synthetic
  source 1..21: mol_type = other RNA
agcctctcttggctgggtgag

SEQ ID NO: 5043 - RNA, 21 nt, synthetic construct
  misc_feature 1..21: note = Synthetic
  source 1..21: mol_type = other RNA
agcctctgccaggcagtgtcc

SEQ ID NO: 5044 - RNA, 21 nt, synthetic construct
  misc_feature 1..21: note = Synthetic
  source 1..21: mol_type = other RNA
agcctctgtgaggcagctcct

SEQ ID NO: 5045 - RNA, 21 nt, synthetic construct
  misc_feature 1..21: note = Synthetic
  source 1..21: mol_type = other RNA
agcctcttttcatcctccaag

SEQ ID NO: 5046 - RNA, 21 nt, synthetic construct
  misc_feature 1..21: note = Synthetic
  source 1..21: mol_type = other RNA
agcctgacggtggatgtctcc

SEQ ID NO: 5047 - RNA, 21 nt, synthetic construct
  misc_feature 1..21: note = Synthetic
  source 1..21: mol_type = other RNA
agcctgttctgcctcccagat

SEQ ID NO: 5048 - RNA, 21 nt, synthetic construct
  misc_feature 1..21: note = Synthetic
  source 1..21: mol_type = other RNA
agccttcctcacactggcact

SEQ ID NO: 5049 - RNA, 21 nt, synthetic construct
  misc_feature 1..21: note = Synthetic
  source 1..21: mol_type = other RNA
agccttgcaggccttcgtgtg

SEQ ID NO: 5050 - RNA, 21 nt, synthetic construct
  misc_feature 1..21: note = Synthetic
  source 1..21: mol_type = other RNA
agccttgctcgtctgagccgt

SEQ ID NO: 5051 - RNA, 21 nt, synthetic construct
  misc_feature 1..21: note = Synthetic
  source 1..21: mol_type = other RNA
agcgaaactcgtcctgggagc

SEQ ID NO: 5052 - RNA, 21 nt, synthetic construct
  misc_feature 1..21: note = Synthetic
  source 1..21: mol_type = other RNA
agcgaccacgttcctcaggtt

SEQ ID NO: 5053 - RNA, 21 nt, synthetic construct
  misc_feature 1..21: note = Synthetic
  source 1..21: mol_type = other RNA
agcgagtagatgtccacacca

SEQ ID NO: 5054 - RNA, 21 nt, synthetic construct
  misc_feature 1..21: note = Synthetic
  source 1..21: mol_type = other RNA
agcgcaatttccagccccagg

SEQ ID NO: 5055 - RNA, 21 nt, synthetic construct
  misc_feature 1..21: note = Synthetic
  source 1..21: mol_type = other RNA
agcgcagttttcctcgtcaga

SEQ ID NO: 5056 - RNA, 21 nt, synthetic construct
  misc_feature 1..21: note = Synthetic
  source 1..21: mol_type = other RNA
agcgccagctggagtggatgc

SEQ ID NO: 5057 - RNA, 21 nt, synthetic construct
  misc_feature 1..21: note = Synthetic
  source 1..21: mol_type = other RNA
agcgctgccatcgcagaccca

SEQ ID NO: 5058 - RNA, 21 nt, synthetic construct
  misc_feature 1..21: note = Synthetic
  source 1..21: mol_type = other RNA
agcgctgcggccactcatccg

SEQ ID NO: 5059 - RNA, 21 nt, synthetic construct
  misc_feature 1..21: note = Synthetic
  source 1..21: mol_type = other RNA
agcggaaaccggggacttcgc

SEQ ID NO: 5060 - RNA, 21 nt, synthetic construct
  misc_feature 1..21: note = Synthetic
  source 1..21: mol_type = other RNA
agcggttgacacggcccccac

SEQ ID NO: 5061 - RNA, 21 nt, synthetic construct
  misc_feature 1..21: note = Synthetic
  source 1..21: mol_type = other RNA
agcgtcatcttcctgacctcg

SEQ ID NO: 5062 - RNA, 21 nt, synthetic construct
  misc_feature 1..21: note = Synthetic
  source 1..21: mol_type = other RNA
agcgttgcacacagtccagtt

SEQ ID NO: 5063 - RNA, 21 nt, synthetic construct
  misc_feature 1..21: note = Synthetic
  source 1..21: mol_type = other RNA
agctcaaaccatcctcccacc

SEQ ID NO: 5064 - RNA, 21 nt, synthetic construct
  misc_feature 1..21: note = Synthetic
  source 1..21: mol_type = other RNA
agctcacgacagcctcaaatg

SEQ ID NO: 5065 - RNA, 21 nt, synthetic construct
  misc_feature 1..21: note = Synthetic
  source 1..21: mol_type = other RNA
agctcagcctcccaaagtgct

SEQ ID NO: 5066 - RNA, 21 nt, synthetic construct
  misc_feature 1..21: note = Synthetic
  source 1..21: mol_type = other RNA
agctccgcttcccgggttcac

SEQ ID NO: 5067 - RNA, 21 nt, synthetic construct
  misc_feature 1..21: note = Synthetic
  source 1..21: mol_type = other RNA
agctccgtggcgatggggagg

SEQ ID NO: 5068 - RNA, 21 nt, synthetic construct
  misc_feature 1..21: note = Synthetic
  source 1..21: mol_type = other RNA
agctcctcatgtccctggcca

SEQ ID NO: 5069 - RNA, 21 nt, synthetic construct
  misc_feature 1..21: note = Synthetic
  source 1..21: mol_type = other RNA
agctctggcaggcaatgcttt

SEQ ID NO: 5070 - RNA, 21 nt, synthetic construct
  misc_feature 1..21: note = Synthetic
  source 1..21: mol_type = other RNA
agctgaagtccccggatttgc

SEQ ID NO: 5071 - RNA, 21 nt, synthetic construct
  misc_feature 1..21: note = Synthetic
  source 1..21: mol_type = other RNA
agctgacctttagcctgacgg

SEQ ID NO: 5072 - RNA, 21 nt, synthetic construct
  misc_feature 1..21: note = Synthetic
  source 1..21: mol_type = other RNA
agctgatttttaactttttgg

SEQ ID NO: 5073 - RNA, 21 nt, synthetic construct
  misc_feature 1..21: note = Synthetic
  source 1..21: mol_type = other RNA
agctgcccccgagaccagaga

SEQ ID NO: 5074 - RNA, 21 nt, synthetic construct
  misc_feature 1..21: note = Synthetic
  source 1..21: mol_type = other RNA
agctggaaaccctggcttccc

SEQ ID NO: 5075 - RNA, 21 nt, synthetic construct
  misc_feature 1..21: note = Synthetic
  source 1..21: mol_type = other RNA
agctggaagccgtcggggcac

SEQ ID NO: 5076 - RNA, 21 nt, synthetic construct
  misc_feature 1..21: note = Synthetic
  source 1..21: mol_type = other RNA
agctggaagccttcctcacac

SEQ ID NO: 5077 - RNA, 21 nt, synthetic construct
  misc_feature 1..21: note = Synthetic
  source 1..21: mol_type = other RNA
agctggagtggatgcactcgc

SEQ ID NO: 5078 - RNA, 21 nt, synthetic construct
  misc_feature 1..21: note = Synthetic
  source 1..21: mol_type = other RNA
agctggcgggaccacaggtga

SEQ ID NO: 5079 - RNA, 21 nt, synthetic construct
  misc_feature 1..21: note = Synthetic
  source 1..21: mol_type = other RNA
agctggctgcaggtgtcggga

SEQ ID NO: 5080 - RNA, 21 nt, synthetic construct
  misc_feature 1..21: note = Synthetic
  source 1..21: mol_type = other RNA
agctgggactacaggtgcccg

SEQ ID NO: 5081 - RNA, 21 nt, synthetic construct
  misc_feature 1..21: note = Synthetic
  source 1..21: mol_type = other RNA
agctgggatcacaggcacgtg

SEQ ID NO: 5082 - RNA, 21 nt, synthetic construct
  misc_feature 1..21: note = Synthetic
  source 1..21: mol_type = other RNA
agctgggggatgcaggtggag

SEQ ID NO: 5083 - RNA, 21 nt, synthetic construct
  misc_feature 1..21: note = Synthetic
  source 1..21: mol_type = other RNA
agctgggtgctgcagatcatt

SEQ ID NO: 5084 - RNA, 21 nt, synthetic construct
  misc_feature 1..21: note = Synthetic
  source 1..21: mol_type = other RNA
agctgtagccgtcctggttgt

SEQ ID NO: 5085 - RNA, 21 nt, synthetic construct
  misc_feature 1..21: note = Synthetic
  source 1..21: mol_type = other RNA
agctgttgcactggaagctgg

SEQ ID NO: 5086 - RNA, 21 nt, synthetic construct
  misc_feature 1..21: note = Synthetic
  source 1..21: mol_type = other RNA
agcttggtgagacattgtcac

SEQ ID NO: 5087 - RNA, 21 nt, synthetic construct
  misc_feature 1..21: note = Synthetic
  source 1..21: mol_type = other RNA
aggaaaggaagaaaccaaaat

SEQ ID NO: 5088 - RNA, 21 nt, synthetic construct
  misc_feature 1..21: note = Synthetic
  source 1..21: mol_type = other RNA
aggaaccgaggccttgagggt

SEQ ID NO: 5089 - RNA, 21 nt, synthetic construct
  misc_feature 1..21: note = Synthetic
  source 1..21: mol_type = other RNA
aggaaccgcggaggaacgcca

SEQ ID NO: 5090 - RNA, 21 nt, synthetic construct
  misc_feature 1..21: note = Synthetic
  source 1..21: mol_type = other RNA
aggaagaaaccaaaatcccaa

SEQ ID NO: 5091 - RNA, 21 nt, synthetic construct
  misc_feature 1..21: note = Synthetic
  source 1..21: mol_type = other RNA
aggaagacccccaggcaaagg

SEQ ID NO: 5092 - RNA, 21 nt, synthetic construct
  misc_feature 1..21: note = Synthetic
  source 1..21: mol_type = other RNA
aggaagacgaggagcacgatg

SEQ ID NO: 5093 - RNA, 21 nt, synthetic construct
  misc_feature 1..21: note = Synthetic
  source 1..21: mol_type = other RNA
aggaagacgaggagcactgta

SEQ ID NO: 5094 - RNA, 21 nt, synthetic construct
  misc_feature 1..21: note = Synthetic
  source 1..21: mol_type = other RNA
aggaagagacgccgtgggctc

SEQ ID NO: 5095 - RNA, 21 nt, synthetic construct
  misc_feature 1..21: note = Synthetic
  source 1..21: mol_type = other RNA
aggaagggttctgggcaggga

SEQ ID NO: 5096 - RNA, 21 nt, synthetic construct
  misc_feature 1..21: note = Synthetic
  source 1..21: mol_type = other RNA
aggaaggtacaaacccacctc

SEQ ID NO: 5097 - RNA, 21 nt, synthetic construct
  misc_feature 1..21: note = Synthetic
  source 1..21: mol_type = other RNA
aggaatgcagcggttgacacg

SEQ ID NO: 5098 - RNA, 21 nt, synthetic construct
  misc_feature 1..21: note = Synthetic
  source 1..21: mol_type = other RNA
aggacaaggtggggacggagg

SEQ ID NO: 5099 - RNA, 21 nt, synthetic construct
  misc_feature 1..21: note = Synthetic
  source 1..21: mol_type = other RNA
aggacaatggacagagccctc

SEQ ID NO: 5100 - RNA, 21 nt, synthetic construct
  misc_feature 1..21: note = Synthetic
  source 1..21: mol_type = other RNA
aggacagagtcggtccagtag

SEQ ID NO: 5101 - RNA, 21 nt, synthetic construct
  misc_feature 1..21: note = Synthetic
  source 1..21: mol_type = other RNA
aggacagccttgctcgtctga

SEQ ID NO: 5102 - RNA, 21 nt, synthetic construct
  misc_feature 1..21: note = Synthetic
  source 1..21: mol_type = other RNA
aggagaaggggtgggccagcc

SEQ ID NO: 5103 - RNA, 21 nt, synthetic construct
  misc_feature 1..21: note = Synthetic
  source 1..21: mol_type = other RNA
aggagaccacgggaatggaag

SEQ ID NO: 5104 - RNA, 21 nt, synthetic construct
  misc_feature 1..21: note = Synthetic
  source 1..21: mol_type = other RNA
aggagatctagggtgatgcca

SEQ ID NO: 5105 - RNA, 21 nt, synthetic construct
  misc_feature 1..21: note = Synthetic
  source 1..21: mol_type = other RNA
aggagatgcatttcccgtctt

SEQ ID NO: 5106 - RNA, 21 nt, synthetic construct
  misc_feature 1..21: note = Synthetic
  source 1..21: mol_type = other RNA
aggagcaaggcgacggtccag

SEQ ID NO: 5107 - RNA, 21 nt, synthetic construct
  misc_feature 1..21: note = Synthetic
  source 1..21: mol_type = other RNA
aggagcacgatggggaggaca

SEQ ID NO: 5108 - RNA, 21 nt, synthetic construct
  misc_feature 1..21: note = Synthetic
  source 1..21: mol_type = other RNA
aggagcactgtagggagaggc

SEQ ID NO: 5109 - RNA, 21 nt, synthetic construct
  misc_feature 1..21: note = Synthetic
  source 1..21: mol_type = other RNA
aggaggcctcgtctgagccgt

SEQ ID NO: 5110 - RNA, 21 nt, synthetic construct
  misc_feature 1..21: note = Synthetic
  source 1..21: mol_type = other RNA
aggagggcccaggataacgga

SEQ ID NO: 5111 - RNA, 21 nt, synthetic construct
  misc_feature 1..21: note = Synthetic
  source 1..21: mol_type = other RNA
aggaggggcggggagattctg

SEQ ID NO: 5112 - RNA, 21 nt, synthetic construct
  misc_feature 1..21: note = Synthetic
  source 1..21: mol_type = other RNA
aggataacggagggcgactcg

SEQ ID NO: 5113 - RNA, 21 nt, synthetic construct
  misc_feature 1..21: note = Synthetic
  source 1..21: mol_type = other RNA
aggatccaccacgatggccct

SEQ ID NO: 5114 - RNA, 21 nt, synthetic construct
  misc_feature 1..21: note = Synthetic
  source 1..21: mol_type = other RNA
aggatgggcaccaggctggtg

SEQ ID NO: 5115 - RNA, 21 nt, synthetic construct
  misc_feature 1..21: note = Synthetic
  source 1..21: mol_type = other RNA
aggatggtctcgatctcctga

SEQ ID NO: 5116 - RNA, 21 nt, synthetic construct
  misc_feature 1..21: note = Synthetic
  source 1..21: mol_type = other RNA
aggattgtgtcacggtggaga

SEQ ID NO: 5117 - RNA, 21 nt, synthetic construct
  misc_feature 1..21: note = Synthetic
  source 1..21: mol_type = other RNA
aggatttatttatttttttat

SEQ ID NO: 5118 - RNA, 21 nt, synthetic construct
  misc_feature 1..21: note = Synthetic
  source 1..21: mol_type = other RNA
aggcaaaggaagacgaggagc

SEQ ID NO: 5119 - RNA, 21 nt, synthetic construct
  misc_feature 1..21: note = Synthetic
  source 1..21: mol_type = other RNA
aggcaacgtttcaacctcgta

SEQ ID NO: 5120 - RNA, 21 nt, synthetic construct
  misc_feature 1..21: note = Synthetic
  source 1..21: mol_type = other RNA
aggcaataaccccctacacag

SEQ ID NO: 5121 - RNA, 21 nt, synthetic construct
  misc_feature 1..21: note = Synthetic
  source 1..21: mol_type = other RNA
aggcaatgctttggtcttctc

SEQ ID NO: 5122 - RNA, 21 nt, synthetic construct
  misc_feature 1..21: note = Synthetic
  source 1..21: mol_type = other RNA
aggcacagatactggcagccg

SEQ ID NO: 5123 - RNA, 21 nt, synthetic construct
  misc_feature 1..21: note = Synthetic
  source 1..21: mol_type = other RNA
aggcacctgtgtctggccaaa

SEQ ID NO: 5124 - RNA, 21 nt, synthetic construct
  misc_feature 1..21: note = Synthetic
  source 1..21: mol_type = other RNA
aggcacgctctgtcacacagc

SEQ ID NO: 5125 - RNA, 21 nt, synthetic construct
  misc_feature 1..21: note = Synthetic
  source 1..21: mol_type = other RNA
aggcacgtgccaccgtaccca

SEQ ID NO: 5126 - RNA, 21 nt, synthetic construct
  misc_feature 1..21: note = Synthetic
  source 1..21: mol_type = other RNA
aggcactcgtagccgatctta

SEQ ID NO: 5127 - RNA, 21 nt, synthetic construct
  misc_feature 1..21: note = Synthetic
  source 1..21: mol_type = other RNA
aggcacttaataaatattaag

SEQ ID NO: 5128 - RNA, 21 nt, synthetic construct
  misc_feature 1..21: note = Synthetic
  source 1..21: mol_type = other RNA
aggcagatgttcacgccacgt

SEQ ID NO: 5129 - RNA, 21 nt, synthetic construct
  misc_feature 1..21: note = Synthetic
  source 1..21: mol_type = other RNA
aggcagccgggaggtgtcggg

SEQ ID NO: 5130 - RNA, 21 nt, synthetic construct
  misc_feature 1..21: note = Synthetic
  source 1..21: mol_type = other RNA
aggcagctcctcatgtccctg

SEQ ID NO: 5131 - RNA, 21 nt, synthetic construct
  misc_feature 1..21: note = Synthetic
  source 1..21: mol_type = other RNA
aggcagggccagggggtcccg

SEQ ID NO: 5132 - RNA, 21 nt, synthetic construct
  misc_feature 1..21: note = Synthetic
  source 1..21: mol_type = other RNA
aggcagtggaactcgaaggcc

SEQ ID NO: 5133 - RNA, 21 nt, synthetic construct
  misc_feature 1..21: note = Synthetic
  source 1..21: mol_type = other RNA
aggcagtgtcccgacccggat

SEQ ID NO: 5134 - RNA, 21 nt, synthetic construct
  misc_feature 1..21: note = Synthetic
  source 1..21: mol_type = other RNA
aggcatttcagaggcaataac

SEQ ID NO: 5135 - RNA, 21 nt, synthetic construct
  misc_feature 1..21: note = Synthetic
  source 1..21: mol_type = other RNA
aggcatttgcatagaagtgga

SEQ ID NO: 5136 - RNA, 21 nt, synthetic construct
  misc_feature 1..21: note = Synthetic
  source 1..21: mol_type = other RNA
aggccacgtgtcctcacggcc

SEQ ID NO: 5137 - RNA, 21 nt, synthetic construct
  misc_feature 1..21: note = Synthetic
  source 1..21: mol_type = other RNA
aggccagactgcggactgcag

SEQ ID NO: 5138 - RNA, 21 nt, synthetic construct
  misc_feature 1..21: note = Synthetic
  source 1..21: mol_type = other RNA
aggccatgggctgctgatgca

SEQ ID NO: 5139 - RNA, 21 nt, synthetic construct
  misc_feature 1..21: note = Synthetic
  source 1..21: mol_type = other RNA
aggcccacagctgggggatgc

SEQ ID NO: 5140 - RNA, 21 nt, synthetic construct
  misc_feature 1..21: note = Synthetic
  source 1..21: mol_type = other RNA
aggccccctttcttgatcttg

SEQ ID NO: 5141 - RNA, 21 nt, synthetic construct
  misc_feature 1..21: note = Synthetic
  source 1..21: mol_type = other RNA
aggccgagcaggggctactgt

SEQ ID NO: 5142 - RNA, 21 nt, synthetic construct
  misc_feature 1..21: note = Synthetic
  source 1..21: mol_type = other RNA
aggccggcgaggtctcaggaa

SEQ ID NO: 5143 - RNA, 21 nt, synthetic construct
  misc_feature 1..21: note = Synthetic
  source 1..21: mol_type = other RNA
aggcctcgtctgagccgtcca

SEQ ID NO: 5144 - RNA, 21 nt, synthetic construct
  misc_feature 1..21: note = Synthetic
  source 1..21: mol_type = other RNA
aggcctggtctccaactcctg

SEQ ID NO: 5145 - RNA, 21 nt, synthetic construct
  misc_feature 1..21: note = Synthetic
  source 1..21: mol_type = other RNA
aggccttcgtgtgggggtcca

SEQ ID NO: 5146 - RNA, 21 nt, synthetic construct
  misc_feature 1..21: note = Synthetic
  source 1..21: mol_type = other RNA
aggccttgagggtggccgggg

SEQ ID NO: 5147 - RNA, 21 nt, synthetic construct
  misc_feature 1..21: note = Synthetic
  source 1..21: mol_type = other RNA
aggcgacggtccagcgcaatt

SEQ ID NO: 5148 - RNA, 21 nt, synthetic construct
  misc_feature 1..21: note = Synthetic
  source 1..21: mol_type = other RNA
aggcgatcctcctgcctcagc

SEQ ID NO: 5149 - RNA, 21 nt, synthetic construct
  misc_feature 1..21: note = Synthetic
  source 1..21: mol_type = other RNA
aggcgatggagcccacagcct

SEQ ID NO: 5150 - RNA, 21 nt, synthetic construct
  misc_feature 1..21: note = Synthetic
  source 1..21: mol_type = other RNA
aggcgcaggtaaacttgggcg

SEQ ID NO: 5151 - RNA, 21 nt, synthetic construct
  misc_feature 1..21: note = Synthetic
  source 1..21: mol_type = other RNA
aggcggccactgaggagatct

SEQ ID NO: 5152 - RNA, 21 nt, synthetic construct
  misc_feature 1..21: note = Synthetic
  source 1..21: mol_type = other RNA
aggcggctccggggacccggg

SEQ ID NO: 5153 - RNA, 21 nt, synthetic construct
  misc_feature 1..21: note = Synthetic
  source 1..21: mol_type = other RNA
aggcggttggcactgaaaatg

SEQ ID NO: 5154 - RNA, 21 nt, synthetic construct
  misc_feature 1..21: note = Synthetic
  source 1..21: mol_type = other RNA
aggcgtgagccactgcgcccg

SEQ ID NO: 5155 - RNA, 21 nt, synthetic construct
  misc_feature 1..21: note = Synthetic
  source 1..21: mol_type = other RNA
aggcgtgaggcacctgtgtct

SEQ ID NO: 5156 - RNA, 21 nt, synthetic construct
  misc_feature 1..21: note = Synthetic
  source 1..21: mol_type = other RNA
aggctaacctggctgtctagc

SEQ ID NO: 5157 - RNA, 21 nt, synthetic construct
  misc_feature 1..21: note = Synthetic
  source 1..21: mol_type = other RNA
aggctacaaaaaccttctata

SEQ ID NO: 5158 - RNA, 21 nt, synthetic construct
  misc_feature 1..21: note = Synthetic
  source 1..21: mol_type = other RNA
aggctctgcctctgggaagtg

SEQ ID NO: 5159 - RNA, 21 nt, synthetic construct
  misc_feature 1..21: note = Synthetic
  source 1..21: mol_type = other RNA
aggctggaaagcagtggcata

SEQ ID NO: 5160 - RNA, 21 nt, synthetic construct
  misc_feature 1..21: note = Synthetic
  source 1..21: mol_type = other RNA
aggctggagtgcagtggctcg

SEQ ID NO: 5161 - RNA, 21 nt, synthetic construct
  misc_feature 1..21: note = Synthetic
  source 1..21: mol_type = other RNA
aggctggtgtactcgctccgg

SEQ ID NO: 5162 - RNA, 21 nt, synthetic construct
  misc_feature 1..21: note = Synthetic
  source 1..21: mol_type = other RNA
aggctggtgtcctgacagcca

SEQ ID NO: 5163 - RNA, 21 nt, synthetic construct
  misc_feature 1..21: note = Synthetic
  source 1..21: mol_type = other RNA
aggctgtcactgtctctccgg

SEQ ID NO: 5164 - RNA, 21 nt, synthetic construct
  misc_feature 1..21: note = Synthetic
  source 1..21: mol_type = other RNA
aggcttatcacggttccctgc

SEQ ID NO: 5165 - RNA, 21 nt, synthetic construct
  misc_feature 1..21: note = Synthetic
  source 1..21: mol_type = other RNA
aggcttgcatagaagaggtaa

SEQ ID NO: 5166 - RNA, 21 nt, synthetic construct
  misc_feature 1..21: note = Synthetic
  source 1..21: mol_type = other RNA
agggacgcatttacgtgctcc

SEQ ID NO: 5167 - RNA, 21 nt, synthetic construct
  misc_feature 1..21: note = Synthetic
  source 1..21: mol_type = other RNA
agggacgggactccaggcaga

SEQ ID NO: 5168 - RNA, 21 nt, synthetic construct
  misc_feature 1..21: note = Synthetic
  source 1..21: mol_type = other RNA
agggagaggcacgctctgtca

SEQ ID NO: 5169 - RNA, 21 nt, synthetic construct
  misc_feature 1..21: note = Synthetic
  source 1..21: mol_type = other RNA
agggaggcacagatactggca

SEQ ID NO: 5170 - RNA, 21 nt, synthetic construct
  misc_feature 1..21: note = Synthetic
  source 1..21: mol_type = other RNA
agggcaaaggctaacctggct

SEQ ID NO: 5171 - RNA, 21 nt, synthetic construct
  misc_feature 1..21: note = Synthetic
  source 1..21: mol_type = other RNA
agggccagggggtcccgttgg

SEQ ID NO: 5172 - RNA, 21 nt, synthetic construct
  misc_feature 1..21: note = Synthetic
  source 1..21: mol_type = other RNA
agggcccaggataacggaggg

SEQ ID NO: 5173 - RNA, 21 nt, synthetic construct
  misc_feature 1..21: note = Synthetic
  source 1..21: mol_type = other RNA
agggccccatgctcgcagcct

SEQ ID NO: 5174 - RNA, 21 nt, synthetic construct
  misc_feature 1..21: note = Synthetic
  source 1..21: mol_type = other RNA
agggccccgagaatagtcact

SEQ ID NO: 5175 - RNA, 21 nt, synthetic construct
  misc_feature 1..21: note = Synthetic
  source 1..21: mol_type = other RNA
agggcgacaggtggccacagc

SEQ ID NO: 5176 - RNA, 21 nt, synthetic construct
  misc_feature 1..21: note = Synthetic
  source 1..21: mol_type = other RNA
agggcgacaggtggccacagg

SEQ ID NO: 5177 - RNA, 21 nt, synthetic construct
  misc_feature 1..21: note = Synthetic
  source 1..21: mol_type = other RNA
agggcgactcgtgtatgtcgc

SEQ ID NO: 5178 - RNA, 21 nt, synthetic construct
  misc_feature 1..21: note = Synthetic
  source 1..21: mol_type = other RNA
agggcgccccccaggacaagg

SEQ ID NO: 5179 - RNA, 21 nt, synthetic construct
  misc_feature 1..21: note = Synthetic
  source 1..21: mol_type = other RNA
aggggcggggagattctgagg

SEQ ID NO: 5180 - RNA, 21 nt, synthetic construct
  misc_feature 1..21: note = Synthetic
  source 1..21: mol_type = other RNA
aggggctactgtccccttgga

SEQ ID NO: 5181 - RNA, 21 nt, synthetic construct
  misc_feature 1..21: note = Synthetic
  source 1..21: mol_type = other RNA
agggggtcccgttggtgccat

SEQ ID NO: 5182 - RNA, 21 nt, synthetic construct
  misc_feature 1..21: note = Synthetic
  source 1..21: mol_type = other RNA
aggggtagctgtagccgtcct

SEQ ID NO: 5183 - RNA, 21 nt, synthetic construct
  misc_feature 1..21: note = Synthetic
  source 1..21: mol_type = other RNA
aggggtcgggaggatgggcac

SEQ ID NO: 5184 - RNA, 21 nt, synthetic construct
  misc_feature 1..21: note = Synthetic
  source 1..21: mol_type = other RNA
aggggtggccccaggcagccg

SEQ ID NO: 5185 - RNA, 21 nt, synthetic construct
  misc_feature 1..21: note = Synthetic
  source 1..21: mol_type = other RNA
aggggtgggccagcctctttt

SEQ ID NO: 5186 - RNA, 21 nt, synthetic construct
  misc_feature 1..21: note = Synthetic
  source 1..21: mol_type = other RNA
aggggtttggcttagagattg

SEQ ID NO: 5187 - RNA, 21 nt, synthetic construct
  misc_feature 1..21: note = Synthetic
  source 1..21: mol_type = other RNA
agggtcttcatctgttgccca

SEQ ID NO: 5188 - RNA, 21 nt, synthetic construct
  misc_feature 1..21: note = Synthetic
  source 1..21: mol_type = other RNA
agggtgaccagtgactcaggc

SEQ ID NO: 5189 - RNA, 21 nt, synthetic construct
  misc_feature 1..21: note = Synthetic
  source 1..21: mol_type = other RNA
agggtgatgcattcgccgctg

SEQ ID NO: 5190 - RNA, 21 nt, synthetic construct
  misc_feature 1..21: note = Synthetic
  source 1..21: mol_type = other RNA
agggtgatgccattgggccac

SEQ ID NO: 5191 - RNA, 21 nt, synthetic construct
  misc_feature 1..21: note = Synthetic
  source 1..21: mol_type = other RNA
agggtggccgggggcccctct

SEQ ID NO: 5192 - RNA, 21 nt, synthetic construct
  misc_feature 1..21: note = Synthetic
  source 1..21: mol_type = other RNA
agggtggtcctctcacaccag

SEQ ID NO: 5193 - RNA, 21 nt, synthetic construct
  misc_feature 1..21: note = Synthetic
  source 1..21: mol_type = other RNA
agggttctgggcagggacggg

SEQ ID NO: 5194 - RNA, 21 nt, synthetic construct
  misc_feature 1..21: note = Synthetic
  source 1..21: mol_type = other RNA
agggtttgcaaaaataaatag

SEQ ID NO: 5195 - RNA, 21 nt, synthetic construct
  misc_feature 1..21: note = Synthetic
  source 1..21: mol_type = other RNA
aggtaaacacgttgactcctg

SEQ ID NO: 5196 - RNA, 21 nt, synthetic construct
  misc_feature 1..21: note = Synthetic
  source 1..21: mol_type = other RNA
aggtaaacttgggcgagtggg

SEQ ID NO: 5197 - RNA, 21 nt, synthetic construct
  misc_feature 1..21: note = Synthetic
  source 1..21: mol_type = other RNA
aggtaaccgggtgtctcaggc

SEQ ID NO: 5198 - RNA, 21 nt, synthetic construct
  misc_feature 1..21: note = Synthetic
  source 1..21: mol_type = other RNA
aggtacaaacccacctcgaaa

SEQ ID NO: 5199 - RNA, 21 nt, synthetic construct
  misc_feature 1..21: note = Synthetic
  source 1..21: mol_type = other RNA
aggtaggcgatggagcccaca

SEQ ID NO: 5200 - RNA, 21 nt, synthetic construct
  misc_feature 1..21: note = Synthetic
  source 1..21: mol_type = other RNA
aggtcagaccagtagattcta

SEQ ID NO: 5201 - RNA, 21 nt, synthetic construct
  misc_feature 1..21: note = Synthetic
  source 1..21: mol_type = other RNA
aggtcattgcagacgtgggaa

SEQ ID NO: 5202 - RNA, 21 nt, synthetic construct
  misc_feature 1..21: note = Synthetic
  source 1..21: mol_type = other RNA
aggtcgggtggttgtgtgctg

SEQ ID NO: 5203 - RNA, 21 nt, synthetic construct
  misc_feature 1..21: note = Synthetic
  source 1..21: mol_type = other RNA
aggtctcaggaagggttctgg

SEQ ID NO: 5204 - RNA, 21 nt, synthetic construct
  misc_feature 1..21: note = Synthetic
  source 1..21: mol_type = other RNA
aggtgacagacaagcacgtct

SEQ ID NO: 5205 - RNA, 21 nt, synthetic construct
  misc_feature 1..21: note = Synthetic
  source 1..21: mol_type = other RNA
aggtgagcaccgggcaggagg

SEQ ID NO: 5206 - RNA, 21 nt, synthetic construct
  misc_feature 1..21: note = Synthetic
  source 1..21: mol_type = other RNA
aggtgcccgccaccacgcccg

SEQ ID NO: 5207 - RNA, 21 nt, synthetic construct
  misc_feature 1..21: note = Synthetic
  source 1..21: mol_type = other RNA
aggtggagctgttgcactgga

SEQ ID NO: 5208 - RNA, 21 nt, synthetic construct
  misc_feature 1..21: note = Synthetic
  source 1..21: mol_type = other RNA
aggtggccacagcgcagtttt

SEQ ID NO: 5209 - RNA, 21 nt, synthetic construct
  misc_feature 1..21: note = Synthetic
  source 1..21: mol_type = other RNA
aggtggccacaggacagcctt

SEQ ID NO: 5210 - RNA, 21 nt, synthetic construct
  misc_feature 1..21: note = Synthetic
  source 1..21: mol_type = other RNA
aggtgggcggacataaagacg

SEQ ID NO: 5211 - RNA, 21 nt, synthetic construct
  misc_feature 1..21: note = Synthetic
  source 1..21: mol_type = other RNA
aggtggggacggaggtgtcgc

SEQ ID NO: 5212 - RNA, 21 nt, synthetic construct
  misc_feature 1..21: note = Synthetic
  source 1..21: mol_type = other RNA
aggtgtcatcctggtcccccc

SEQ ID NO: 5213 - RNA, 21 nt, synthetic construct
  misc_feature 1..21: note = Synthetic
  source 1..21: mol_type = other RNA
aggtgtcgccacagagcacag

SEQ ID NO: 5214 - RNA, 21 nt, synthetic construct
  misc_feature 1..21: note = Synthetic
  source 1..21: mol_type = other RNA
aggtgtcgggaacaggtcggg

SEQ ID NO: 5215 - RNA, 21 nt, synthetic construct
  misc_feature 1..21: note = Synthetic
  source 1..21: mol_type = other RNA
aggtgtcgggatcctgacact

SEQ ID NO: 5216 - RNA, 21 nt, synthetic construct
  misc_feature 1..21: note = Synthetic
  source 1..21: mol_type = other RNA
aggttcacgcagagctggctg

SEQ ID NO: 5217 - RNA, 21 nt, synthetic construct
  misc_feature 1..21: note = Synthetic
  source 1..21: mol_type = other RNA
aggttggggatgaggctggtg

SEQ ID NO: 5218 - RNA, 21 nt, synthetic construct
  misc_feature 1..21: note = Synthetic
  source 1..21: mol_type = other RNA
aggttgtggaagagaaccata

SEQ ID NO: 5219 - RNA, 21 nt, synthetic construct
  misc_feature 1..21: note = Synthetic
  source 1..21: mol_type = other RNA
aggttttcagccaacaagttg

SEQ ID NO: 5220 - RNA, 21 nt, synthetic construct
  misc_feature 1..21: note = Synthetic
  source 1..21: mol_type = other RNA
agtaacacggcgatttcagaa

SEQ ID NO: 5221 - RNA, 21 nt, synthetic construct
  misc_feature 1..21: note = Synthetic
  source 1..21: mol_type = other RNA
agtaagacattcaggctacaa

SEQ ID NO: 5222 - RNA, 21 nt, synthetic construct
  misc_feature 1..21: note = Synthetic
  source 1..21: mol_type = other RNA
agtacatgaagccatgaacag

SEQ ID NO: 5223 - RNA, 21 nt, synthetic construct
  misc_feature 1..21: note = Synthetic
  source 1..21: mol_type = other RNA
agtagagacggggtttcacgt

SEQ ID NO: 5224 - RNA, 21 nt, synthetic construct
  misc_feature 1..21: note = Synthetic
  source 1..21: mol_type = other RNA
agtagaggcggccactgagga

SEQ ID NO: 5225 - RNA, 21 nt, synthetic construct
  misc_feature 1..21: note = Synthetic
  source 1..21: mol_type = other RNA
agtagatgtccacaccattca

SEQ ID NO: 5226 - RNA, 21 nt, synthetic construct
  misc_feature 1..21: note = Synthetic
  source 1..21: mol_type = other RNA
agtagatgttgctgtggatcc

SEQ ID NO: 5227 - RNA, 21 nt, synthetic construct
  misc_feature 1..21: note = Synthetic
  source 1..21: mol_type = other RNA
agtagattctattgctggcca

SEQ ID NO: 5228 - RNA, 21 nt, synthetic construct
  misc_feature 1..21: note = Synthetic
  source 1..21: mol_type = other RNA
agtagctgggactacaggtgc

SEQ ID NO: 5229 - RNA, 21 nt, synthetic construct
  misc_feature 1..21: note = Synthetic
  source 1..21: mol_type = other RNA
agtagctgggatcacaggcac

SEQ ID NO: 5230 - RNA, 21 nt, synthetic construct
  misc_feature 1..21: note = Synthetic
  source 1..21: mol_type = other RNA
agtaggttttcagccaacaag

SEQ ID NO: 5231 - RNA, 21 nt, synthetic construct
  misc_feature 1..21: note = Synthetic
  source 1..21: mol_type = other RNA
agtcaacccagtagaggcggc

SEQ ID NO: 5232 - RNA, 21 nt, synthetic construct
  misc_feature 1..21: note = Synthetic
  source 1..21: mol_type = other RNA
agtcacagacgaactgccgag

SEQ ID NO: 5233 - RNA, 21 nt, synthetic construct
  misc_feature 1..21: note = Synthetic
  source 1..21: mol_type = other RNA
agtcaccagcgagtagatgtc

SEQ ID NO: 5234 - RNA, 21 nt, synthetic construct
  misc_feature 1..21: note = Synthetic
  source 1..21: mol_type = other RNA
agtcactgaacaaatacagca

SEQ ID NO: 5235 - RNA, 21 nt, synthetic construct
  misc_feature 1..21: note = Synthetic
  source 1..21: mol_type = other RNA
agtcagtccagtacatgaagc

SEQ ID NO: 5236 - RNA, 21 nt, synthetic construct
  misc_feature 1..21: note = Synthetic
  source 1..21: mol_type = other RNA
agtcatattcccggtcacact

SEQ ID NO: 5237 - RNA, 21 nt, synthetic construct
  misc_feature 1..21: note = Synthetic
  source 1..21: mol_type = other RNA
agtccacagccagcccgtcgg

SEQ ID NO: 5238 - RNA, 21 nt, synthetic construct
  misc_feature 1..21: note = Synthetic
  source 1..21: mol_type = other RNA
agtccacttggccatcgcacc

SEQ ID NO: 5239 - RNA, 21 nt, synthetic construct
  misc_feature 1..21: note = Synthetic
  source 1..21: mol_type = other RNA
agtccagtacatgaagccatg

SEQ ID NO: 5240 - RNA, 21 nt, synthetic construct
  misc_feature 1..21: note = Synthetic
  source 1..21: mol_type = other RNA
agtccagttcgtgcaaataat

SEQ ID NO: 5241 - RNA, 21 nt, synthetic construct
  misc_feature 1..21: note = Synthetic
  source 1..21: mol_type = other RNA
agtccccgccgcggcgaggag

SEQ ID NO: 5242 - RNA, 21 nt, synthetic construct
  misc_feature 1..21: note = Synthetic
  source 1..21: mol_type = other RNA
agtccccggatttgcaggtga

SEQ ID NO: 5243 - RNA, 21 nt, synthetic construct
  misc_feature 1..21: note = Synthetic
  source 1..21: mol_type = other RNA
agtcccggcagtctctagcca

SEQ ID NO: 5244 - RNA, 21 nt, synthetic construct
  misc_feature 1..21: note = Synthetic
  source 1..21: mol_type = other RNA
agtcccggtcaacctgcccct

SEQ ID NO: 5245 - RNA, 21 nt, synthetic construct
  misc_feature 1..21: note = Synthetic
  source 1..21: mol_type = other RNA
agtcccggtctgagtcacaga

SEQ ID NO: 5246 - RNA, 21 nt, synthetic construct
  misc_feature 1..21: note = Synthetic
  source 1..21: mol_type = other RNA
agtcccgtcaaacgatccaga

SEQ ID NO: 5247 - RNA, 21 nt, synthetic construct
  misc_feature 1..21: note = Synthetic
  source 1..21: mol_type = other RNA
agtcggggccaccatcacagc

SEQ ID NO: 5248 - RNA, 21 nt, synthetic construct
  misc_feature 1..21: note = Synthetic
  source 1..21: mol_type = other RNA
agtcggggtcgttgtcgcagg

SEQ ID NO: 5249 - RNA, 21 nt, synthetic construct
  misc_feature 1..21: note = Synthetic
  source 1..21: mol_type = other RNA
agtcggtccagtagatgttgc

SEQ ID NO: 5250 - RNA, 21 nt, synthetic construct
  misc_feature 1..21: note = Synthetic
  source 1..21: mol_type = other RNA
agtctcgctctgtcgcccagg

SEQ ID NO: 5251 - RNA, 21 nt, synthetic construct
  misc_feature 1..21: note = Synthetic
  source 1..21: mol_type = other RNA
agtctctagccatgttgcaga

SEQ ID NO: 5252 - RNA, 21 nt, synthetic construct
  misc_feature 1..21: note = Synthetic
  source 1..21: mol_type = other RNA
agtctgacggaggctgtcact

SEQ ID NO: 5253 - RNA, 21 nt, synthetic construct
  misc_feature 1..21: note = Synthetic
  source 1..21: mol_type = other RNA
agtgaagtttggagtcaaccc

SEQ ID NO: 5254 - RNA, 21 nt, synthetic construct
  misc_feature 1..21: note = Synthetic
  source 1..21: mol_type = other RNA
agtgaatggcttggaggcatt

SEQ ID NO: 5255 - RNA, 21 nt, synthetic construct
  misc_feature 1..21: note = Synthetic
  source 1..21: mol_type = other RNA
agtgacacccatctcccagaa

SEQ ID NO: 5256 - RNA, 21 nt, synthetic construct
  misc_feature 1..21: note = Synthetic
  source 1..21: mol_type = other RNA
agtgactcaggctctgcctct

SEQ ID NO: 5257 - RNA, 21 nt, synthetic construct
  misc_feature 1..21: note = Synthetic
  source 1..21: mol_type = other RNA
agtgataacagtttcaaccaa

SEQ ID NO: 5258 - RNA, 21 nt, synthetic construct
  misc_feature 1..21: note = Synthetic
  source 1..21: mol_type = other RNA
agtgatccagctcagcctccc

SEQ ID NO: 5259 - RNA, 21 nt, synthetic construct
  misc_feature 1..21: note = Synthetic
  source 1..21: mol_type = other RNA
agtgcaaaataataacacaaa

SEQ ID NO: 5260 - RNA, 21 nt, synthetic construct
  misc_feature 1..21: note = Synthetic
  source 1..21: mol_type = other RNA
agtgcaaacataacaaaaaat

SEQ ID NO: 5261 - RNA, 21 nt, synthetic construct
  misc_feature 1..21: note = Synthetic
  source 1..21: mol_type = other RNA
agtgcaacagtaacacggcga

SEQ ID NO: 5262 - RNA, 21 nt, synthetic construct
  misc_feature 1..21: note = Synthetic
  source 1..21: mol_type = other RNA
agtgcaaggagaccacgggaa

SEQ ID NO: 5263 - RNA, 21 nt, synthetic construct
  misc_feature 1..21: note = Synthetic
  source 1..21: mol_type = other RNA
agtgcagtggctcgatcatgg

SEQ ID NO: 5264 - RNA, 21 nt, synthetic construct
  misc_feature 1..21: note = Synthetic
  source 1..21: mol_type = other RNA
agtgcccaggacagagtcggt

SEQ ID NO: 5265 - RNA, 21 nt, synthetic construct
  misc_feature 1..21: note = Synthetic
  source 1..21: mol_type = other RNA
agtgctgggattacaggcgtg

SEQ ID NO: 5266 - RNA, 21 nt, synthetic construct
  misc_feature 1..21: note = Synthetic
  source 1..21: mol_type = other RNA
agtggaactcgaaggccgagc

SEQ ID NO: 5267 - RNA, 21 nt, synthetic construct
  misc_feature 1..21: note = Synthetic
  source 1..21: mol_type = other RNA
agtggaagcactaggtgggcg

SEQ ID NO: 5268 - RNA, 21 nt, synthetic construct
  misc_feature 1..21: note = Synthetic
  source 1..21: mol_type = other RNA
agtggatgcactcgccactta

SEQ ID NO: 5269 - RNA, 21 nt, synthetic construct
  misc_feature 1..21: note = Synthetic
  source 1..21: mol_type = other RNA
agtggcataatcatagctcac

SEQ ID NO: 5270 - RNA, 21 nt, synthetic construct
  misc_feature 1..21: note = Synthetic
  source 1..21: mol_type = other RNA
agtggcatcatttggtgaatg

SEQ ID NO: 5271 - RNA, 21 nt, synthetic construct
  misc_feature 1..21: note = Synthetic
  source 1..21: mol_type = other RNA
agtggcgcaatctcggctcac

SEQ ID NO: 5272 - RNA, 21 nt, synthetic construct
  misc_feature 1..21: note = Synthetic
  source 1..21: mol_type = other RNA
agtggctcgatcatggctcac

SEQ ID NO: 5273 - RNA, 21 nt, synthetic construct
  misc_feature 1..21: note = Synthetic
  source 1..21: mol_type = other RNA
agtgggggttgatctgcgggg

SEQ ID NO: 5274 - RNA, 21 nt, synthetic construct
  misc_feature 1..21: note = Synthetic
  source 1..21: mol_type = other RNA
agtgggtaggggtcgggagga

SEQ ID NO: 5275 - RNA, 21 nt, synthetic construct
  misc_feature 1..21: note = Synthetic
  source 1..21: mol_type = other RNA
agtggtttaaaaagtgacacc

SEQ ID NO: 5276 - RNA, 21 nt, synthetic construct
  misc_feature 1..21: note = Synthetic
  source 1..21: mol_type = other RNA
agtgtacaactctgaactgag

SEQ ID NO: 5277 - RNA, 21 nt, synthetic construct
  misc_feature 1..21: note = Synthetic
  source 1..21: mol_type = other RNA
agtgtcacattaacgcagcca

SEQ ID NO: 5278 - RNA, 21 nt, synthetic construct
  misc_feature 1..21: note = Synthetic
  source 1..21: mol_type = other RNA
agtgtcagacagccttgctcg

SEQ ID NO: 5279 - RNA, 21 nt, synthetic construct
  misc_feature 1..21: note = Synthetic
  source 1..21: mol_type = other RNA
agtgtcccgacccggatcacg

SEQ ID NO: 5280 - RNA, 21 nt, synthetic construct
  misc_feature 1..21: note = Synthetic
  source 1..21: mol_type = other RNA
agtgttttgtccctggggaca

SEQ ID NO: 5281 - RNA, 21 nt, synthetic construct
  misc_feature 1..21: note = Synthetic
  source 1..21: mol_type = other RNA
agttcactcctcttggctggg

SEQ ID NO: 5282 - RNA, 21 nt, synthetic construct
  misc_feature 1..21: note = Synthetic
  source 1..21: mol_type = other RNA
agttccccagtcagtccagta

SEQ ID NO: 5283 - RNA, 21 nt, synthetic construct
  misc_feature 1..21: note = Synthetic
  source 1..21: mol_type = other RNA
agttcgtgcaaataatctttg

SEQ ID NO: 5284 - RNA, 21 nt, synthetic construct
  misc_feature 1..21: note = Synthetic
  source 1..21: mol_type = other RNA
agttctcgatattcacgatca

SEQ ID NO: 5285 - RNA, 21 nt, synthetic construct
  misc_feature 1..21: note = Synthetic
  source 1..21: mol_type = other RNA
agttcttccatagaaggaaga

SEQ ID NO: 5286 - RNA, 21 nt, synthetic construct
  misc_feature 1..21: note = Synthetic
  source 1..21: mol_type = other RNA
agttgacatcggaacctgtga

SEQ ID NO: 5287 - RNA, 21 nt, synthetic construct
  misc_feature 1..21: note = Synthetic
  source 1..21: mol_type = other RNA
agttgatgctgttgatgttct

SEQ ID NO: 5288 - RNA, 21 nt, synthetic construct
  misc_feature 1..21: note = Synthetic
  source 1..21: mol_type = other RNA
agttgtatttctgaaataggg

SEQ ID NO: 5289 - RNA, 21 nt, synthetic construct
  misc_feature 1..21: note = Synthetic
  source 1..21: mol_type = other RNA
agtttaggggtttggcttaga

SEQ ID NO: 5290 - RNA, 21 nt, synthetic construct
  misc_feature 1..21: note = Synthetic
  source 1..21: mol_type = other RNA
agtttcaaccaatatacaaag

SEQ ID NO: 5291 - RNA, 21 nt, synthetic construct
  misc_feature 1..21: note = Synthetic
  source 1..21: mol_type = other RNA
agtttccatcagagcactgga

SEQ ID NO: 5292 - RNA, 21 nt, synthetic construct
  misc_feature 1..21: note = Synthetic
  source 1..21: mol_type = other RNA
agtttggagtcaacccagtag

SEQ ID NO: 5293 - RNA, 21 nt, synthetic construct
  misc_feature 1..21: note = Synthetic
  source 1..21: mol_type = other RNA
agtttggtctcggtgccacca

SEQ ID NO: 5294 - RNA, 21 nt, synthetic construct
  misc_feature 1..21: note = Synthetic
  source 1..21: mol_type = other RNA
agttttcctcgtcagatttgt

SEQ ID NO: 5295 - RNA, 21 nt, synthetic construct
  misc_feature 1..21: note = Synthetic
  source 1..21: mol_type = other RNA
ataaaacaaagctctggcagg

SEQ ID NO: 5296 - RNA, 21 nt, synthetic construct
  misc_feature 1..21: note = Synthetic
  source 1..21: mol_type = other RNA
ataaaacaaggccggcgaggt

SEQ ID NO: 5297 - RNA, 21 nt, synthetic construct
  misc_feature 1..21: note = Synthetic
  source 1..21: mol_type = other RNA
ataaagaagaggcatttcaga

SEQ ID NO: 5298 - RNA, 21 nt, synthetic construct
  misc_feature 1..21: note = Synthetic
  source 1..21: mol_type = other RNA
ataaagacgacaatggcagtt

SEQ ID NO: 5299 - RNA, 21 nt, synthetic construct
  misc_feature 1..21: note = Synthetic
  source 1..21: mol_type = other RNA
ataaatagattttatatatat

SEQ ID NO: 5300 - RNA, 21 nt, synthetic construct
  misc_feature 1..21: note = Synthetic
  source 1..21: mol_type = other RNA
ataaatatataaaacaaagct

SEQ ID NO: 5301 - RNA, 21 nt, synthetic construct
  misc_feature 1..21: note = Synthetic
  source 1..21: mol_type = other RNA
ataaatattaagggtgaccag

SEQ ID NO: 5302 - RNA, 21 nt, synthetic construct
  misc_feature 1..21: note = Synthetic
  source 1..21: mol_type = other RNA
ataacaaaaaatccccactat

SEQ ID NO: 5303 - RNA, 21 nt, synthetic construct
  misc_feature 1..21: note = Synthetic
  source 1..21: mol_type = other RNA
ataacacaaatgccaaatgta

SEQ ID NO: 5304 - RNA, 21 nt, synthetic construct
  misc_feature 1..21: note = Synthetic
  source 1..21: mol_type = other RNA
ataacagtttcaaccaatata

SEQ ID NO: 5305 - RNA, 21 nt, synthetic construct
  misc_feature 1..21: note = Synthetic
  source 1..21: mol_type = other RNA
ataaccccctacacagggccc

SEQ ID NO: 5306 - RNA, 21 nt, synthetic construct
  misc_feature 1..21: note = Synthetic
  source 1..21: mol_type = other RNA
ataacggagggcgactcgtgt

SEQ ID NO: 5307 - RNA, 21 nt, synthetic construct
  misc_feature 1..21: note = Synthetic
  source 1..21: mol_type = other RNA
ataacgttttcctcttcacgc

SEQ ID NO: 5308 - RNA, 21 nt, synthetic construct
  misc_feature 1..21: note = Synthetic
  source 1..21: mol_type = other RNA
ataagtgataacagtttcaac

SEQ ID NO: 5309 - RNA, 21 nt, synthetic construct
  misc_feature 1..21: note = Synthetic
  source 1..21: mol_type = other RNA
ataataacacaaatgccaaat

SEQ ID NO: 5310 - RNA, 21 nt, synthetic construct
  misc_feature 1..21: note = Synthetic
  source 1..21: mol_type = other RNA
ataatcatagctcacgacagc

SEQ ID NO: 5311 - RNA, 21 nt, synthetic construct
  misc_feature 1..21: note = Synthetic
  source 1..21: mol_type = other RNA
ataatctttgtacataaagaa

SEQ ID NO: 5312 - RNA, 21 nt, synthetic construct
  misc_feature 1..21: note = Synthetic
  source 1..21: mol_type = other RNA
atacaaagtgcaaacataaca

SEQ ID NO: 5313 - RNA, 21 nt, synthetic construct
  misc_feature 1..21: note = Synthetic
  source 1..21: mol_type = other RNA
atacaacggggacatcattct

SEQ ID NO: 5314 - RNA, 21 nt, synthetic construct
  misc_feature 1..21: note = Synthetic
  source 1..21: mol_type = other RNA
atacagcaaccagggtttgca

SEQ ID NO: 5315 - RNA, 21 nt, synthetic construct
  misc_feature 1..21: note = Synthetic
  source 1..21: mol_type = other RNA
atacagtggtttaaaaagtga

SEQ ID NO: 5316 - RNA, 21 nt, synthetic construct
  misc_feature 1..21: note = Synthetic
  source 1..21: mol_type = other RNA
atacatacaacggggacatca

SEQ ID NO: 5317 - RNA, 21 nt, synthetic construct
  misc_feature 1..21: note = Synthetic
  source 1..21: mol_type = other RNA
atacccatcaacgacaagatt

SEQ ID NO: 5318 - RNA, 21 nt, synthetic construct
  misc_feature 1..21: note = Synthetic
  source 1..21: mol_type = other RNA
atactggcagccgccattgct

SEQ ID NO: 5319 - RNA, 21 nt, synthetic construct
  misc_feature 1..21: note = Synthetic
  source 1..21: mol_type = other RNA
atactttgtcctcaaagacgg

SEQ ID NO: 5320 - RNA, 21 nt, synthetic construct
  misc_feature 1..21: note = Synthetic
  source 1..21: mol_type = other RNA
atagaagaggtaaacacgttg

SEQ ID NO: 5321 - RNA, 21 nt, synthetic construct
  misc_feature 1..21: note = Synthetic
  source 1..21: mol_type = other RNA
atagaaggaagacccccaggc

SEQ ID NO: 5322 - RNA, 21 nt, synthetic construct
  misc_feature 1..21: note = Synthetic
  source 1..21: mol_type = other RNA
atagaagtggaagcactaggt

SEQ ID NO: 5323 - RNA, 21 nt, synthetic construct
  misc_feature 1..21: note = Synthetic
  source 1..21: mol_type = other RNA
atagacggggttgtcaaagtt

SEQ ID NO: 5324 - RNA, 21 nt, synthetic construct
  misc_feature 1..21: note = Synthetic
  source 1..21: mol_type = other RNA
atagattttatatatatgtgt

SEQ ID NO: 5325 - RNA, 21 nt, synthetic construct
  misc_feature 1..21: note = Synthetic
  source 1..21: mol_type = other RNA
atagctcacgacagcctcaaa

SEQ ID NO: 5326 - RNA, 21 nt, synthetic construct
  misc_feature 1..21: note = Synthetic
  source 1..21: mol_type = other RNA
ataggaagagacgccgtgggc

SEQ ID NO: 5327 - RNA, 21 nt, synthetic construct
  misc_feature 1..21: note = Synthetic
  source 1..21: mol_type = other RNA
atagggtcttcatctgttgcc

SEQ ID NO: 5328 - RNA, 21 nt, synthetic construct
  misc_feature 1..21: note = Synthetic
  source 1..21: mol_type = other RNA
atagtcactgaacaaatacag

SEQ ID NO: 5329 - RNA, 21 nt, synthetic construct
  misc_feature 1..21: note = Synthetic
  source 1..21: mol_type = other RNA
atagttgtatttctgaaatag

SEQ ID NO: 5330 - RNA, 21 nt, synthetic construct
  misc_feature 1..21: note = Synthetic
  source 1..21: mol_type = other RNA
atataaaacaaagctctggca

SEQ ID NO: 5331 - RNA, 21 nt, synthetic construct
  misc_feature 1..21: note = Synthetic
  source 1..21: mol_type = other RNA
atataagtgataacagtttca

SEQ ID NO: 5332 - RNA, 21 nt, synthetic construct
  misc_feature 1..21: note = Synthetic
  source 1..21: mol_type = other RNA
atatacaaagtgcaaacataa

SEQ ID NO: 5333 - RNA, 21 nt, synthetic construct
  misc_feature 1..21: note = Synthetic
  source 1..21: mol_type = other RNA
atatataaaacaaagctctgg

SEQ ID NO: 5334 - RNA, 21 nt, synthetic construct
  misc_feature 1..21: note = Synthetic
  source 1..21: mol_type = other RNA
atatataagtgataacagttt

SEQ ID NO: 5335 - RNA, 21 nt, synthetic construct
  misc_feature 1..21: note = Synthetic
  source 1..21: mol_type = other RNA
atatatataagtgataacagt

SEQ ID NO: 5336 - RNA, 21 nt, synthetic construct
  misc_feature 1..21: note = Synthetic
  source 1..21: mol_type = other RNA
atatatatataagtgataaca

SEQ ID NO: 5337 - RNA, 21 nt, synthetic construct
  misc_feature 1..21: note = Synthetic
  source 1..21: mol_type = other RNA
atatatatatataagtgataa

SEQ ID NO: 5338 - RNA, 21 nt, synthetic construct
  misc_feature 1..21: note = Synthetic
  source 1..21: mol_type = other RNA
atatatatatatataagtgat

SEQ ID NO: 5339 - RNA, 21 nt, synthetic construct
  misc_feature 1..21: note = Synthetic
  source 1..21: mol_type = other RNA
atatatatgtgtgtatatata

SEQ ID NO: 5340 - RNA, 21 nt, synthetic construct
  misc_feature 1..21: note = Synthetic
  source 1..21: mol_type = other RNA
atatatgtgtgtatatatata

SEQ ID NO: 5341 - RNA, 21 nt, synthetic construct
  misc_feature 1..21: note = Synthetic
  source 1..21: mol_type = other RNA
atatcctctggggacagtagg

SEQ ID NO: 5342 - RNA, 21 nt, synthetic construct
  misc_feature 1..21: note = Synthetic
  source 1..21: mol_type = other RNA
atatcgcactctttgatgggt

SEQ ID NO: 5343 - RNA, 21 nt, synthetic construct
  misc_feature 1..21: note = Synthetic
  source 1..21: mol_type = other RNA
atatctgtccaaaatactttg

SEQ ID NO: 5344 - RNA, 21 nt, synthetic construct
  misc_feature 1..21: note = Synthetic
  source 1..21: mol_type = other RNA
atatcttcgcatcttcgctgg

SEQ ID NO: 5345 - RNA, 21 nt, synthetic construct
  misc_feature 1..21: note = Synthetic
  source 1..21: mol_type = other RNA
atatgtgtgtatatatatata

SEQ ID NO: 5346 - RNA, 21 nt, synthetic construct
  misc_feature 1..21: note = Synthetic
  source 1..21: mol_type = other RNA
atattaagggtgaccagtgac

SEQ ID NO: 5347 - RNA, 21 nt, synthetic construct
  misc_feature 1..21: note = Synthetic
  source 1..21: mol_type = other RNA
atattcacgatcacggctttg

SEQ ID NO: 5348 - RNA, 21 nt, synthetic construct
  misc_feature 1..21: note = Synthetic
  source 1..21: mol_type = other RNA
atattcccggtcacactgccg

SEQ ID NO: 5349 - RNA, 21 nt, synthetic construct
  misc_feature 1..21: note = Synthetic
  source 1..21: mol_type = other RNA
atcaacgacaagattggggaa

SEQ ID NO: 5350 - RNA, 21 nt, synthetic construct
  misc_feature 1..21: note = Synthetic
  source 1..21: mol_type = other RNA
atcacagcgccagctggagtg

SEQ ID NO: 5351 - RNA, 21 nt, synthetic construct
  misc_feature 1..21: note = Synthetic
  source 1..21: mol_type = other RNA
atcacaggcacgtgccaccgt

SEQ ID NO: 5352 - RNA, 21 nt, synthetic construct
  misc_feature 1..21: note = Synthetic
  source 1..21: mol_type = other RNA
atcacagtaagacattcaggc

SEQ ID NO: 5353 - RNA, 21 nt, synthetic construct
  misc_feature 1..21: note = Synthetic
  source 1..21: mol_type = other RNA
atcacgacctgctgtgtccta

SEQ ID NO: 5354 - RNA, 21 nt, synthetic construct
  misc_feature 1..21: note = Synthetic
  source 1..21: mol_type = other RNA
atcacggctttgaagtcccgg

SEQ ID NO: 5355 - RNA, 21 nt, synthetic construct
  misc_feature 1..21: note = Synthetic
  source 1..21: mol_type = other RNA
atcacggttccctgcactggg

SEQ ID NO: 5356 - RNA, 21 nt, synthetic construct
  misc_feature 1..21: note = Synthetic
  source 1..21: mol_type = other RNA
atcagagcactggaattcgtc

SEQ ID NO: 5357 - RNA, 21 nt, synthetic construct
  misc_feature 1..21: note = Synthetic
  source 1..21: mol_type = other RNA
atcagagccatcctggcactc

SEQ ID NO: 5358 - RNA, 21 nt, synthetic construct
  misc_feature 1..21: note = Synthetic
  source 1..21: mol_type = other RNA
atcagtgcaacagtaacacgg

SEQ ID NO: 5359 - RNA, 21 nt, synthetic construct
  misc_feature 1..21: note = Synthetic
  source 1..21: mol_type = other RNA
atcatagctcacgacagcctc

SEQ ID NO: 5360 - RNA, 21 nt, synthetic construct
  misc_feature 1..21: note = Synthetic
  source 1..21: mol_type = other RNA
atcatggctcactgcaacctc

SEQ ID NO: 5361 - RNA, 21 nt, synthetic construct
  misc_feature 1..21: note = Synthetic
  source 1..21: mol_type = other RNA
atcattctcccaaaaagcgtt

SEQ ID NO: 5362 - RNA, 21 nt, synthetic construct
  misc_feature 1..21: note = Synthetic
  source 1..21: mol_type = other RNA
atcattctctgggacaggtca

SEQ ID NO: 5363 - RNA, 21 nt, synthetic construct
  misc_feature 1..21: note = Synthetic
  source 1..21: mol_type = other RNA
atcatttccgacgccatgaat

SEQ ID NO: 5364 - RNA, 21 nt, synthetic construct
  misc_feature 1..21: note = Synthetic
  source 1..21: mol_type = other RNA
atcatttggtgaatgagtttg

SEQ ID NO: 5365 - RNA, 21 nt, synthetic construct
  misc_feature 1..21: note = Synthetic
  source 1..21: mol_type = other RNA
atccaccacgatggcccttgg

SEQ ID NO: 5366 - RNA, 21 nt, synthetic construct
  misc_feature 1..21: note = Synthetic
  source 1..21: mol_type = other RNA
atccacccgcctcggcctccc

SEQ ID NO: 5367 - RNA, 21 nt, synthetic construct
  misc_feature 1..21: note = Synthetic
  source 1..21: mol_type = other RNA
atccagactggaggatttatt

SEQ ID NO: 5368 - RNA, 21 nt, synthetic construct
  misc_feature 1..21: note = Synthetic
  source 1..21: mol_type = other RNA
atccagctcagcctcccaaag

SEQ ID NO: 5369 - RNA, 21 nt, synthetic construct
  misc_feature 1..21: note = Synthetic
  source 1..21: mol_type = other RNA
atccagtccacagccagcccg

SEQ ID NO: 5370 - RNA, 21 nt, synthetic construct
  misc_feature 1..21: note = Synthetic
  source 1..21: mol_type = other RNA
atcccaacacacacgacagaa

SEQ ID NO: 5371 - RNA, 21 nt, synthetic construct
  misc_feature 1..21: note = Synthetic
  source 1..21: mol_type = other RNA
atcccaacccaagccattgca

SEQ ID NO: 5372 - RNA, 21 nt, synthetic construct
  misc_feature 1..21: note = Synthetic
  source 1..21: mol_type = other RNA
atcccatcccaacacacacga

SEQ ID NO: 5373 - RNA, 21 nt, synthetic construct
  misc_feature 1..21: note = Synthetic
  source 1..21: mol_type = other RNA
atccccactatctgtacaggg

SEQ ID NO: 5374 - RNA, 21 nt, synthetic construct
  misc_feature 1..21: note = Synthetic
  source 1..21: mol_type = other RNA
atcccctcccctttcatcttc

SEQ ID NO: 5375 - RNA, 21 nt, synthetic construct
  misc_feature 1..21: note = Synthetic
  source 1..21: mol_type = other RNA
atcccttgtgacatcttcacg

SEQ ID NO: 5376 - RNA, 21 nt, synthetic construct
  misc_feature 1..21: note = Synthetic
  source 1..21: mol_type = other RNA
atccctttcctggcttaagga

SEQ ID NO: 5377 - RNA, 21 nt, synthetic construct
  misc_feature 1..21: note = Synthetic
  source 1..21: mol_type = other RNA
atccgagccatcttcgcagtc

SEQ ID NO: 5378 - RNA, 21 nt, synthetic construct
  misc_feature 1..21: note = Synthetic
  source 1..21: mol_type = other RNA
atccgcaacagagacagtgcc

SEQ ID NO: 5379 - RNA, 21 nt, synthetic construct
  misc_feature 1..21: note = Synthetic
  source 1..21: mol_type = other RNA
atcctccaagatggtcttccg

SEQ ID NO: 5380 - RNA, 21 nt, synthetic construct
  misc_feature 1..21: note = Synthetic
  source 1..21: mol_type = other RNA
atcctccagactgaccatcga

SEQ ID NO: 5381 - RNA, 21 nt, synthetic construct
  misc_feature 1..21: note = Synthetic
  source 1..21: mol_type = other RNA
atcctccagactgaccatctg

SEQ ID NO: 5382 - RNA, 21 nt, synthetic construct
  misc_feature 1..21: note = Synthetic
  source 1..21: mol_type = other RNA
atcctcccacctcagcctcgc

SEQ ID NO: 5383 - RNA, 21 nt, synthetic construct
  misc_feature 1..21: note = Synthetic
  source 1..21: mol_type = other RNA
atcctcctgcctcagcctccc

SEQ ID NO: 5384 - RNA, 21 nt, synthetic construct
  misc_feature 1..21: note = Synthetic
  source 1..21: mol_type = other RNA
atcctctggggacagtaggtt

SEQ ID NO: 5385 - RNA, 21 nt, synthetic construct
  misc_feature 1..21: note = Synthetic
  source 1..21: mol_type = other RNA
atcctctgtggtcttctgata

SEQ ID NO: 5386 - RNA, 21 nt, synthetic construct
  misc_feature 1..21: note = Synthetic
  source 1..21: mol_type = other RNA
atcctgacactcatcgatatc

SEQ ID NO: 5387 - RNA, 21 nt, synthetic construct
  misc_feature 1..21: note = Synthetic
  source 1..21: mol_type = other RNA
atcctggcactcagcgctgcc

SEQ ID NO: 5388 - RNA, 21 nt, synthetic construct
  misc_feature 1..21: note = Synthetic
  source 1..21: mol_type = other RNA
atcctggtccccccgggcctg

SEQ ID NO: 5389 - RNA, 21 nt, synthetic construct
  misc_feature 1..21: note = Synthetic
  source 1..21: mol_type = other RNA
atccttcacgaggaaaggaag

SEQ ID NO: 5390 - RNA, 21 nt, synthetic construct
  misc_feature 1..21: note = Synthetic
  source 1..21: mol_type = other RNA
atcgaggggtagctgtagccg

SEQ ID NO: 5391 - RNA, 21 nt, synthetic construct
  misc_feature 1..21: note = Synthetic
  source 1..21: mol_type = other RNA
atcgatatcgcactctttgat

SEQ ID NO: 5392 - RNA, 21 nt, synthetic construct
  misc_feature 1..21: note = Synthetic
  source 1..21: mol_type = other RNA
atcgatatcttcgcatcttcg

SEQ ID NO: 5393 - RNA, 21 nt, synthetic construct
  misc_feature 1..21: note = Synthetic
  source 1..21: mol_type = other RNA
atcgatgcttgagatggagtg

SEQ ID NO: 5394 - RNA, 21 nt, synthetic construct
  misc_feature 1..21: note = Synthetic
  source 1..21: mol_type = other RNA
atcgcacctccagaactgagg

SEQ ID NO: 5395 - RNA, 21 nt, synthetic construct
  misc_feature 1..21: note = Synthetic
  source 1..21: mol_type = other RNA
atcgcactctttgatgggttc

SEQ ID NO: 5396 - RNA, 21 nt, synthetic construct
  misc_feature 1..21: note = Synthetic
  source 1..21: mol_type = other RNA
atcgcagacccacttgtagga

SEQ ID NO: 5397 - RNA, 21 nt, synthetic construct
  misc_feature 1..21: note = Synthetic
  source 1..21: mol_type = other RNA
atcgctcatgtccttgcagtc

SEQ ID NO: 5398 - RNA, 21 nt, synthetic construct
  misc_feature 1..21: note = Synthetic
  source 1..21: mol_type = other RNA
atcggaacctgtgaggcggtt

SEQ ID NO: 5399 - RNA, 21 nt, synthetic construct
  misc_feature 1..21: note = Synthetic
  source 1..21: mol_type = other RNA
atcggggctggtggggcgagg

SEQ ID NO: 5400 - RNA, 21 nt, synthetic construct
  misc_feature 1..21: note = Synthetic
  source 1..21: mol_type = other RNA
atcgtggcagcgaaactcgtc

SEQ ID NO: 5401 - RNA, 21 nt, synthetic construct
  misc_feature 1..21: note = Synthetic
  source 1..21: mol_type = other RNA
atctagggtgatgccattggg

SEQ ID NO: 5402 - RNA, 21 nt, synthetic construct
  misc_feature 1..21: note = Synthetic
  source 1..21: mol_type = other RNA
atctccaccgtggtgagccca

SEQ ID NO: 5403 - RNA, 21 nt, synthetic construct
  misc_feature 1..21: note = Synthetic
  source 1..21: mol_type = other RNA
atctcccagaagccactcata

SEQ ID NO: 5404 - RNA, 21 nt, synthetic construct
  misc_feature 1..21: note = Synthetic
  source 1..21: mol_type = other RNA
atctcctgacctcatgatcca

SEQ ID NO: 5405 - RNA, 21 nt, synthetic construct
  misc_feature 1..21: note = Synthetic
  source 1..21: mol_type = other RNA
atctcgctttgttgctcaggc

SEQ ID NO: 5406 - RNA, 21 nt, synthetic construct
  misc_feature 1..21: note = Synthetic
  source 1..21: mol_type = other RNA
atctcggctcactgcaagctc

SEQ ID NO: 5407 - RNA, 21 nt, synthetic construct
  misc_feature 1..21: note = Synthetic
  source 1..21: mol_type = other RNA
atctcggctgcagaccaagga

SEQ ID NO: 5408 - RNA, 21 nt, synthetic construct
  misc_feature 1..21: note = Synthetic
  source 1..21: mol_type = other RNA
atctgaccagtcccggcagtc

SEQ ID NO: 5409 - RNA, 21 nt, synthetic construct
  misc_feature 1..21: note = Synthetic
  source 1..21: mol_type = other RNA
atctgcggggcagggaggcac

SEQ ID NO: 5410 - RNA, 21 nt, synthetic construct
  misc_feature 1..21: note = Synthetic
  source 1..21: mol_type = other RNA
atctgctgttgtgtgttgaaa

SEQ ID NO: 5411 - RNA, 21 nt, synthetic construct
  misc_feature 1..21: note = Synthetic
  source 1..21: mol_type = other RNA
atctgtacagggacgcattta

SEQ ID NO: 5412 - RNA, 21 nt, synthetic construct
  misc_feature 1..21: note = Synthetic
  source 1..21: mol_type = other RNA
atctgtccaaaatactttgtc

SEQ ID NO: 5413 - RNA, 21 nt, synthetic construct
  misc_feature 1..21: note = Synthetic
  source 1..21: mol_type = other RNA
atctgtcgcccacgtggctga

SEQ ID NO: 5414 - RNA, 21 nt, synthetic construct
  misc_feature 1..21: note = Synthetic
  source 1..21: mol_type = other RNA
atctgtcgcccactgcagtcc

SEQ ID NO: 5415 - RNA, 21 nt, synthetic construct
  misc_feature 1..21: note = Synthetic
  source 1..21: mol_type = other RNA
atctgtctcgaggggtagctg

SEQ ID NO: 5416 - RNA, 21 nt, synthetic construct
  misc_feature 1..21: note = Synthetic
  source 1..21: mol_type = other RNA
atctgttgcccaggctggagt

SEQ ID NO: 5417 - RNA, 21 nt, synthetic construct
  misc_feature 1..21: note = Synthetic
  source 1..21: mol_type = other RNA
atcttaaggtcattgcagacg

SEQ ID NO: 5418 - RNA, 21 nt, synthetic construct
  misc_feature 1..21: note = Synthetic
  source 1..21: mol_type = other RNA
atcttcacgcgggagtctgac

SEQ ID NO: 5419 - RNA, 21 nt, synthetic construct
  misc_feature 1..21: note = Synthetic
  source 1..21: mol_type = other RNA
atcttccatgtttgaggattg

SEQ ID NO: 5420 - RNA, 21 nt, synthetic construct
  misc_feature 1..21: note = Synthetic
  source 1..21: mol_type = other RNA
atcttcctgacctcgtgccgg

SEQ ID NO: 5421 - RNA, 21 nt, synthetic construct
  misc_feature 1..21: note = Synthetic
  source 1..21: mol_type = other RNA
atcttcgcagtcggggtcgtt

SEQ ID NO: 5422 - RNA, 21 nt, synthetic construct
  misc_feature 1..21: note = Synthetic
  source 1..21: mol_type = other RNA
atcttcgcatcttcgctgggc

SEQ ID NO: 5423 - RNA, 21 nt, synthetic construct
  misc_feature 1..21: note = Synthetic
  source 1..21: mol_type = other RNA
atcttcgctgggccaccagct

SEQ ID NO: 5424 - RNA, 21 nt, synthetic construct
  misc_feature 1..21: note = Synthetic
  source 1..21: mol_type = other RNA
atcttggcgggagttccccag

SEQ ID NO: 5425 - RNA, 21 nt, synthetic construct
  misc_feature 1..21: note = Synthetic
  source 1..21: mol_type = other RNA
atctttgtacataaagaagag

SEQ ID NO: 5426 - RNA, 21 nt, synthetic construct
  misc_feature 1..21: note = Synthetic
  source 1..21: mol_type = other RNA
atgaacaggatccaccacgat

SEQ ID NO: 5427 - RNA, 21 nt, synthetic construct
  misc_feature 1..21: note = Synthetic
  source 1..21: mol_type = other RNA
atgaagccatgaacaggatcc

SEQ ID NO: 5428 - RNA, 21 nt, synthetic construct
  misc_feature 1..21: note = Synthetic
  source 1..21: mol_type = other RNA
atgaataaatatataaaacaa

SEQ ID NO: 5429 - RNA, 21 nt, synthetic construct
  misc_feature 1..21: note = Synthetic
  source 1..21: mol_type = other RNA
atgaatccctttcctggctta

SEQ ID NO: 5430 - RNA, 21 nt, synthetic construct
  misc_feature 1..21: note = Synthetic
  source 1..21: mol_type = other RNA
atgacggtgtcataggaagag

SEQ ID NO: 5431 - RNA, 21 nt, synthetic construct
  misc_feature 1..21: note = Synthetic
  source 1..21: mol_type = other RNA
atgaggcagggccagggggtc

SEQ ID NO: 5432 - RNA, 21 nt, synthetic construct
  misc_feature 1..21: note = Synthetic
  source 1..21: mol_type = other RNA
atgaggctggtgtactcgctc

SEQ ID NO: 5433 - RNA, 21 nt, synthetic construct
  misc_feature 1..21: note = Synthetic
  source 1..21: mol_type = other RNA
atgagtttggtctcggtgcca

SEQ ID NO: 5434 - RNA, 21 nt, synthetic construct
  misc_feature 1..21: note = Synthetic
  source 1..21: mol_type = other RNA
atgatatctgtccaaaatact

SEQ ID NO: 5435 - RNA, 21 nt, synthetic construct
  misc_feature 1..21: note = Synthetic
  source 1..21: mol_type = other RNA
atgatccacccgcctcggcct

SEQ ID NO: 5436 - RNA, 21 nt, synthetic construct
  misc_feature 1..21: note = Synthetic
  source 1..21: mol_type = other RNA
atgattcgggggtgacagggc

SEQ ID NO: 5437 - RNA, 21 nt, synthetic construct
  misc_feature 1..21: note = Synthetic
  source 1..21: mol_type = other RNA
atgcaccatgcatggtttttt

SEQ ID NO: 5438 - RNA, 21 nt, synthetic construct
  misc_feature 1..21: note = Synthetic
  source 1..21: mol_type = other RNA
atgcactcgccacttaggcag

SEQ ID NO: 5439 - RNA, 21 nt, synthetic construct
  misc_feature 1..21: note = Synthetic
  source 1..21: mol_type = other RNA
atgcacttcccatcgtggcag

SEQ ID NO: 5440 - RNA, 21 nt, synthetic construct
  misc_feature 1..21: note = Synthetic
  source 1..21: mol_type = other RNA
atgcagcggttgacacggccc

SEQ ID NO: 5441 - RNA, 21 nt, synthetic construct
  misc_feature 1..21: note = Synthetic
  source 1..21: mol_type = other RNA
atgcaggtggagctgttgcac

SEQ ID NO: 5442 - RNA, 21 nt, synthetic construct
  misc_feature 1..21: note = Synthetic
  source 1..21: mol_type = other RNA
atgcagtttccatcagagcac

SEQ ID NO: 5443 - RNA, 21 nt, synthetic construct
  misc_feature 1..21: note = Synthetic
  source 1..21: mol_type = other RNA
atgcatggtttttttttgttt

SEQ ID NO: 5444 - RNA, 21 nt, synthetic construct
  misc_feature 1..21: note = Synthetic
  source 1..21: mol_type = other RNA
atgcattcgccgctgtgacac

SEQ ID NO: 5445 - RNA, 21 nt, synthetic construct
  misc_feature 1..21: note = Synthetic
  source 1..21: mol_type = other RNA
atgcatttcccgtcttggcac

SEQ ID NO: 5446 - RNA, 21 nt, synthetic construct
  misc_feature 1..21: note = Synthetic
  source 1..21: mol_type = other RNA
atgccaaatgtacacagtgta

SEQ ID NO: 5447 - RNA, 21 nt, synthetic construct
  misc_feature 1..21: note = Synthetic
  source 1..21: mol_type = other RNA
atgccattgggccactgaatg

SEQ ID NO: 5448 - RNA, 21 nt, synthetic construct
  misc_feature 1..21: note = Synthetic
  source 1..21: mol_type = other RNA
atgccgtccgggcaggcgcag

SEQ ID NO: 5449 - RNA, 21 nt, synthetic construct
  misc_feature 1..21: note = Synthetic
  source 1..21: mol_type = other RNA
atgcctgagctcaaaccatcc

SEQ ID NO: 5450 - RNA, 21 nt, synthetic construct
  misc_feature 1..21: note = Synthetic
  source 1..21: mol_type = other RNA
atgcctggccagaggccatgg

SEQ ID NO: 5451 - RNA, 21 nt, synthetic construct
  misc_feature 1..21: note = Synthetic
  source 1..21: mol_type = other RNA
atgctcgcagcctctgccagg

SEQ ID NO: 5452 - RNA, 21 nt, synthetic construct
  misc_feature 1..21: note = Synthetic
  source 1..21: mol_type = other RNA
atgctgttgatgttcttaagc

SEQ ID NO: 5453 - RNA, 21 nt, synthetic construct
  misc_feature 1..21: note = Synthetic
  source 1..21: mol_type = other RNA
atgcttgagatggagtgaagt

SEQ ID NO: 5454 - RNA, 21 nt, synthetic construct
  misc_feature 1..21: note = Synthetic
  source 1..21: mol_type = other RNA
atgctttggtcttctctgtct

SEQ ID NO: 5455 - RNA, 21 nt, synthetic construct
  misc_feature 1..21: note = Synthetic
  source 1..21: mol_type = other RNA
atggaagtgggtaggggtcgg

SEQ ID NO: 5456 - RNA, 21 nt, synthetic construct
  misc_feature 1..21: note = Synthetic
  source 1..21: mol_type = other RNA
atggacagagccctcacgcta

SEQ ID NO: 5457 - RNA, 21 nt, synthetic construct
  misc_feature 1..21: note = Synthetic
  source 1..21: mol_type = other RNA
atggagcccacagccttgcag

SEQ ID NO: 5458 - RNA, 21 nt, synthetic construct
  misc_feature 1..21: note = Synthetic
  source 1..21: mol_type = other RNA
atggaggtgtcatcctggtcc

SEQ ID NO: 5459 - RNA, 21 nt, synthetic construct
  misc_feature 1..21: note = Synthetic
  source 1..21: mol_type = other RNA
atggagtgaagtttggagtca

SEQ ID NO: 5460 - RNA, 21 nt, synthetic construct
  misc_feature 1..21: note = Synthetic
  source 1..21: mol_type = other RNA
atggatgcagtttccatcaga

SEQ ID NO: 5461 - RNA, 21 nt, synthetic construct
  misc_feature 1..21: note = Synthetic
  source 1..21: mol_type = other RNA
atggcagttctcgatattcac

SEQ ID NO: 5462 - RNA, 21 nt, synthetic construct
  misc_feature 1..21: note = Synthetic
  source 1..21: mol_type = other RNA
atggcccttggcttggagccg

SEQ ID NO: 5463 - RNA, 21 nt, synthetic construct
  misc_feature 1..21: note = Synthetic
  source 1..21: mol_type = other RNA
atggctcactgcaacctccac

SEQ ID NO: 5464 - RNA, 21 nt, synthetic construct
  misc_feature 1..21: note = Synthetic
  source 1..21: mol_type = other RNA
atggcttcgttgatgatatct

SEQ ID NO: 5465 - RNA, 21 nt, synthetic construct
  misc_feature 1..21: note = Synthetic
  source 1..21: mol_type = other RNA
atggcttggaggcatttgcat

SEQ ID NO: 5466 - RNA, 21 nt, synthetic construct
  misc_feature 1..21: note = Synthetic
  source 1..21: mol_type = other RNA
atgggatctcgctttgttgct

SEQ ID NO: 5467 - RNA, 21 nt, synthetic construct
  misc_feature 1..21: note = Synthetic
  source 1..21: mol_type = other RNA
atgggcaccaggctggtgtcc

SEQ ID NO: 5468 - RNA, 21 nt, synthetic construct
  misc_feature 1..21: note = Synthetic
  source 1..21: mol_type = other RNA
atgggcactgtccgaagcctg

SEQ ID NO: 5469 - RNA, 21 nt, synthetic construct
  misc_feature 1..21: note = Synthetic
  source 1..21: mol_type = other RNA
atgggctgctgatgcaccatg

SEQ ID NO: 5470 - RNA, 21 nt, synthetic construct
  misc_feature 1..21: note = Synthetic
  source 1..21: mol_type = other RNA
atggggaggacaatggacaga

SEQ ID NO: 5471 - RNA, 21 nt, synthetic construct
  misc_feature 1..21: note = Synthetic
  source 1..21: mol_type = other RNA
atggggtcttactatgttgcc

SEQ ID NO: 5472 - RNA, 21 nt, synthetic construct
  misc_feature 1..21: note = Synthetic
  source 1..21: mol_type = other RNA
atgggttcatctgaccagtcc

SEQ ID NO: 5473 - RNA, 21 nt, synthetic construct
  misc_feature 1..21: note = Synthetic
  source 1..21: mol_type = other RNA
atggtctcgatctcctgacct

SEQ ID NO: 5474 - RNA, 21 nt, synthetic construct
  misc_feature 1..21: note = Synthetic
  source 1..21: mol_type = other RNA
atggtcttccggttgcccccg

SEQ ID NO: 5475 - RNA, 21 nt, synthetic construct
  misc_feature 1..21: note = Synthetic
  source 1..21: mol_type = other RNA
atggtttttttttgttttttt

SEQ ID NO: 5476 - RNA, 21 nt, synthetic construct
  misc_feature 1..21: note = Synthetic
  source 1..21: mol_type = other RNA
atgtacacagtgtacaactct

SEQ ID NO: 5477 - RNA, 21 nt, synthetic construct
  misc_feature 1..21: note = Synthetic
  source 1..21: mol_type = other RNA
atgtccacaccattcaggccc

SEQ ID NO: 5478 - RNA, 21 nt, synthetic construct
  misc_feature 1..21: note = Synthetic
  source 1..21: mol_type = other RNA
atgtccctggccagcagcatg

SEQ ID NO: 5479 - RNA, 21 nt, synthetic construct
  misc_feature 1..21: note = Synthetic
  source 1..21: mol_type = other RNA
atgtccttgcagtcatattcc

SEQ ID NO: 5480 - RNA, 21 nt, synthetic construct
  misc_feature 1..21: note = Synthetic
  source 1..21: mol_type = other RNA
atgtcgcggaggcggctccgg

SEQ ID NO: 5481 - RNA, 21 nt, synthetic construct
  misc_feature 1..21: note = Synthetic
  source 1..21: mol_type = other RNA
atgtctcctgggtggccactg

SEQ ID NO: 5482 - RNA, 21 nt, synthetic construct
  misc_feature 1..21: note = Synthetic
  source 1..21: mol_type = other RNA
atgtctctgctgatgacggtg

SEQ ID NO: 5483 - RNA, 21 nt, synthetic construct
  misc_feature 1..21: note = Synthetic
  source 1..21: mol_type = other RNA
atgtggacctcatcctctgtg

SEQ ID NO: 5484 - RNA, 21 nt, synthetic construct
  misc_feature 1..21: note = Synthetic
  source 1..21: mol_type = other RNA
atgtgtgtatatatatatata

SEQ ID NO: 5485 - RNA, 21 nt, synthetic construct
  misc_feature 1..21: note = Synthetic
  source 1..21: mol_type = other RNA
atgttcacgccacgtcatcct

SEQ ID NO: 5486 - RNA, 21 nt, synthetic construct
  misc_feature 1..21: note = Synthetic
  source 1..21: mol_type = other RNA
atgttcttaagccgccagttc

SEQ ID NO: 5487 - RNA, 21 nt, synthetic construct
  misc_feature 1..21: note = Synthetic
  source 1..21: mol_type = other RNA
atgttgcagactttgtccagg

SEQ ID NO: 5488 - RNA, 21 nt, synthetic construct
  misc_feature 1..21: note = Synthetic
  source 1..21: mol_type = other RNA
atgttgcccaggctggaaagc

SEQ ID NO: 5489 - RNA, 21 nt, synthetic construct
  misc_feature 1..21: note = Synthetic
  source 1..21: mol_type = other RNA
atgttgctgtggatccagtcc

SEQ ID NO: 5490 - RNA, 21 nt, synthetic construct
  misc_feature 1..21: note = Synthetic
  source 1..21: mol_type = other RNA
atgtttgaggattgtgtcacg

SEQ ID NO: 5491 - RNA, 21 nt, synthetic construct
  misc_feature 1..21: note = Synthetic
  source 1..21: mol_type = other RNA
atgttttaaacacatacccat

SEQ ID NO: 5492 - RNA, 21 nt, synthetic construct
  misc_feature 1..21: note = Synthetic
  source 1..21: mol_type = other RNA
atgttttcagtcaccagcgag

SEQ ID NO: 5493 - RNA, 21 nt, synthetic construct
  misc_feature 1..21: note = Synthetic
  source 1..21: mol_type = other RNA
attaacgcagccaacttcatc

SEQ ID NO: 5494 - RNA, 21 nt, synthetic construct
  misc_feature 1..21: note = Synthetic
  source 1..21: mol_type = other RNA
attaagggtgaccagtgactc

SEQ ID NO: 5495 - RNA, 21 nt, synthetic construct
  misc_feature 1..21: note = Synthetic
  source 1..21: mol_type = other RNA
attacaggcgtgagccactgc

SEQ ID NO: 5496 - RNA, 21 nt, synthetic construct
  misc_feature 1..21: note = Synthetic
  source 1..21: mol_type = other RNA
attacaggcgtgaggcacctg

SEQ ID NO: 5497 - RNA, 21 nt, synthetic construct
  misc_feature 1..21: note = Synthetic
  source 1..21: mol_type = other RNA
attcacgatcacggctttgaa

SEQ ID NO: 5498 - RNA, 21 nt, synthetic construct
  misc_feature 1..21: note = Synthetic
  source 1..21: mol_type = other RNA
attcagccagatcatttccga

SEQ ID NO: 5499 - RNA, 21 nt, synthetic construct
  misc_feature 1..21: note = Synthetic
  source 1..21: mol_type = other RNA
attcaggccccctttcttgat

SEQ ID NO: 5500 - RNA, 21 nt, synthetic construct
  misc_feature 1..21: note = Synthetic
  source 1..21: mol_type = other RNA
attcaggctacaaaaaccttc

SEQ ID NO: 5501 - RNA, 21 nt, synthetic construct
  misc_feature 1..21: note = Synthetic
  source 1..21: mol_type = other RNA
attcattgacacgggctttcc

SEQ ID NO: 5502 - RNA, 21 nt, synthetic construct
  misc_feature 1..21: note = Synthetic
  source 1..21: mol_type = other RNA
attcattttttaagagatggg

SEQ ID NO: 5503 - RNA, 21 nt, synthetic construct
  misc_feature 1..21: note = Synthetic
  source 1..21: mol_type = other RNA
attcccggtcacactgccggc

SEQ ID NO: 5504 - RNA, 21 nt, synthetic construct
  misc_feature 1..21: note = Synthetic
  source 1..21: mol_type = other RNA
attcgccgctgtgacacttga

SEQ ID NO: 5505 - RNA, 21 nt, synthetic construct
  misc_feature 1..21: note = Synthetic
  source 1..21: mol_type = other RNA
attcgggggtgacagggcaaa

SEQ ID NO: 5506 - RNA, 21 nt, synthetic construct
  misc_feature 1..21: note = Synthetic
  source 1..21: mol_type = other RNA
attcgtcagggcgacaggtgg

SEQ ID NO: 5507 - RNA, 21 nt, synthetic construct
  misc_feature 1..21: note = Synthetic
  source 1..21: mol_type = other RNA
attcgttggtcccgcactctt

SEQ ID NO: 5508 - RNA, 21 nt, synthetic construct
  misc_feature 1..21: note = Synthetic
  source 1..21: mol_type = other RNA
attctattgctggccacctcc

SEQ ID NO: 5509 - RNA, 21 nt, synthetic construct
  misc_feature 1..21: note = Synthetic
  source 1..21: mol_type = other RNA
attctcccaaaaagcgttgca

SEQ ID NO: 5510 - RNA, 21 nt, synthetic construct
  misc_feature 1..21: note = Synthetic
  source 1..21: mol_type = other RNA
attctcctgcctcagcctccc

SEQ ID NO: 5511 - RNA, 21 nt, synthetic construct
  misc_feature 1..21: note = Synthetic
  source 1..21: mol_type = other RNA
attctctgggacaggtcagac

SEQ ID NO: 5512 - RNA, 21 nt, synthetic construct
  misc_feature 1..21: note = Synthetic
  source 1..21: mol_type = other RNA
attctgaggcaacgtttcaac

SEQ ID NO: 5513 - RNA, 21 nt, synthetic construct
  misc_feature 1..21: note = Synthetic
  source 1..21: mol_type = other RNA
attgacacgggctttccctgg

SEQ ID NO: 5514 - RNA, 21 nt, synthetic construct
  misc_feature 1..21: note = Synthetic
  source 1..21: mol_type = other RNA
attgatcacagtaagacattc

SEQ ID NO: 5515 - RNA, 21 nt, synthetic construct
  misc_feature 1..21: note = Synthetic
  source 1..21: mol_type = other RNA
attgcagacgtgggaacagcc

SEQ ID NO: 5516 - RNA, 21 nt, synthetic construct
  misc_feature 1..21: note = Synthetic
  source 1..21: mol_type = other RNA
attgcatgggcactgtccgaa

SEQ ID NO: 5517 - RNA, 21 nt, synthetic construct
  misc_feature 1..21: note = Synthetic
  source 1..21: mol_type = other RNA
attgccaatcccttgtgacat

SEQ ID NO: 5518 - RNA, 21 nt, synthetic construct
  misc_feature 1..21: note = Synthetic
  source 1..21: mol_type = other RNA
attgctcagggtggtcctctc

SEQ ID NO: 5519 - RNA, 21 nt, synthetic construct
  misc_feature 1..21: note = Synthetic
  source 1..21: mol_type = other RNA
attgctggccacctccgtgtc

SEQ ID NO: 5520 - RNA, 21 nt, synthetic construct
  misc_feature 1..21: note = Synthetic
  source 1..21: mol_type = other RNA
attgggccactgaatgttttc

SEQ ID NO: 5521 - RNA, 21 nt, synthetic construct
  misc_feature 1..21: note = Synthetic
  source 1..21: mol_type = other RNA
attggggaagtgaatggcttg

SEQ ID NO: 5522 - RNA, 21 nt, synthetic construct
  misc_feature 1..21: note = Synthetic
  source 1..21: mol_type = other RNA
attggtggatgaggcagggcc

SEQ ID NO: 5523 - RNA, 21 nt, synthetic construct
  misc_feature 1..21: note = Synthetic
  source 1..21: mol_type = other RNA
attgtcactatctccaccgtg

SEQ ID NO: 5524 - RNA, 21 nt, synthetic construct
  misc_feature 1..21: note = Synthetic
  source 1..21: mol_type = other RNA
attgtgtcacggtggagagaa

SEQ ID NO: 5525 - RNA, 21 nt, synthetic construct
  misc_feature 1..21: note = Synthetic
  source 1..21: mol_type = other RNA
atttaagaaatttaattgatc

SEQ ID NO: 5526 - RNA, 21 nt, synthetic construct
  misc_feature 1..21: note = Synthetic
  source 1..21: mol_type = other RNA
atttaattgatcacagtaaga

SEQ ID NO: 5527 - RNA, 21 nt, synthetic construct
  misc_feature 1..21: note = Synthetic
  source 1..21: mol_type = other RNA
atttacgtgctccgaaaccag

SEQ ID NO: 5528 - RNA, 21 nt, synthetic construct
  misc_feature 1..21: note = Synthetic
  source 1..21: mol_type = other RNA
atttatttatttttttatagt

SEQ ID NO: 5529 - RNA, 21 nt, synthetic construct
  misc_feature 1..21: note = Synthetic
  source 1..21: mol_type = other RNA
atttatttttttatagttgta

SEQ ID NO: 5530 - RNA, 21 nt, synthetic construct
  misc_feature 1..21: note = Synthetic
  source 1..21: mol_type = other RNA
atttcagaaagaacctgaagt

SEQ ID NO: 5531 - RNA, 21 nt, synthetic construct
  misc_feature 1..21: note = Synthetic
  source 1..21: mol_type = other RNA
atttcagaggcaataaccccc

SEQ ID NO: 5532 - RNA, 21 nt, synthetic construct
  misc_feature 1..21: note = Synthetic
  source 1..21: mol_type = other RNA
atttccagccccagggcccca

SEQ ID NO: 5533 - RNA, 21 nt, synthetic construct
  misc_feature 1..21: note = Synthetic
  source 1..21: mol_type = other RNA
atttcccgtcttggcactgga

SEQ ID NO: 5534 - RNA, 21 nt, synthetic construct
  misc_feature 1..21: note = Synthetic
  source 1..21: mol_type = other RNA
atttccgacgccatgaatccc

SEQ ID NO: 5535 - RNA, 21 nt, synthetic construct
  misc_feature 1..21: note = Synthetic
  source 1..21: mol_type = other RNA
atttcctctgccagcaacgtc

SEQ ID NO: 5536 - RNA, 21 nt, synthetic construct
  misc_feature 1..21: note = Synthetic
  source 1..21: mol_type = other RNA
atttctgaaatagggtcttca

SEQ ID NO: 5537 - RNA, 21 nt, synthetic construct
  misc_feature 1..21: note = Synthetic
  source 1..21: mol_type = other RNA
atttgcaggtgacagacaagc

SEQ ID NO: 5538 - RNA, 21 nt, synthetic construct
  misc_feature 1..21: note = Synthetic
  source 1..21: mol_type = other RNA
atttgcatagaagtggaagca

SEQ ID NO: 5539 - RNA, 21 nt, synthetic construct
  misc_feature 1..21: note = Synthetic
  source 1..21: mol_type = other RNA
atttggtgaatgagtttggtc

SEQ ID NO: 5540 - RNA, 21 nt, synthetic construct
  misc_feature 1..21: note = Synthetic
  source 1..21: mol_type = other RNA
atttgtccttgcagtcggggc

SEQ ID NO: 5541 - RNA, 21 nt, synthetic construct
  misc_feature 1..21: note = Synthetic
  source 1..21: mol_type = other RNA
attttatatatatgtgtgtat

SEQ ID NO: 5542 - RNA, 21 nt, synthetic construct
  misc_feature 1..21: note = Synthetic
  source 1..21: mol_type = other RNA
atttttaactttttggttttt

SEQ ID NO: 5543 - RNA, 21 nt, synthetic construct
  misc_feature 1..21: note = Synthetic
  source 1..21: mol_type = other RNA
atttttagtagagacggggtt

SEQ ID NO: 5544 - RNA, 21 nt, synthetic construct
  misc_feature 1..21: note = Synthetic
  source 1..21: mol_type = other RNA
attttttaagagatggggtct

SEQ ID NO: 5545 - RNA, 21 nt, synthetic construct
  misc_feature 1..21: note = Synthetic
  source 1..21: mol_type = other RNA
attttttgtatttttagtaga

SEQ ID NO: 5546 - RNA, 21 nt, synthetic construct
  misc_feature 1..21: note = Synthetic
  source 1..21: mol_type = other RNA
atttttttatagttgtatttc

SEQ ID NO: 5547 - RNA, 21 nt, synthetic construct
  misc_feature 1..21: note = Synthetic
  source 1..21: mol_type = other RNA
caaaaaatccccactatctgt

SEQ ID NO: 5548 - RNA, 21 nt, synthetic construct
  misc_feature 1..21: note = Synthetic
  source 1..21: mol_type = other RNA
caaaaaccttctatacagtgg

SEQ ID NO: 5549 - RNA, 21 nt, synthetic construct
  misc_feature 1..21: note = Synthetic
  source 1..21: mol_type = other RNA
caaaaagcgttgcacacagtc

SEQ ID NO: 5550 - RNA, 21 nt, synthetic construct
  misc_feature 1..21: note = Synthetic
  source 1..21: mol_type = other RNA
caaaaataaatagattttata

SEQ ID NO: 5551 - RNA, 21 nt, synthetic construct
  misc_feature 1..21: note = Synthetic
  source 1..21: mol_type = other RNA
caaaacttcctggagagaaat

SEQ ID NO: 5552 - RNA, 21 nt, synthetic construct
  misc_feature 1..21: note = Synthetic
  source 1..21: mol_type = other RNA
caaaataataacacaaatgcc

SEQ ID NO: 5553 - RNA, 21 nt, synthetic construct
  misc_feature 1..21: note = Synthetic
  source 1..21: mol_type = other RNA
caaaatactttgtcctcaaag

SEQ ID NO: 5554 - RNA, 21 nt, synthetic construct
  misc_feature 1..21: note = Synthetic
  source 1..21: mol_type = other RNA
caaaatcccaacccaagccat

SEQ ID NO: 5555 - RNA, 21 nt, synthetic construct
  misc_feature 1..21: note = Synthetic
  source 1..21: mol_type = other RNA
caaacataacaaaaaatcccc

SEQ ID NO: 5556 - RNA, 21 nt, synthetic construct
  misc_feature 1..21: note = Synthetic
  source 1..21: mol_type = other RNA
caaaccatcctcccacctcag

SEQ ID NO: 5557 - RNA, 21 nt, synthetic construct
  misc_feature 1..21: note = Synthetic
  source 1..21: mol_type = other RNA
caaacccacctcgaaagacac

SEQ ID NO: 5558 - RNA, 21 nt, synthetic construct
  misc_feature 1..21: note = Synthetic
  source 1..21: mol_type = other RNA
caaacgatccagactggagga

SEQ ID NO: 5559 - RNA, 21 nt, synthetic construct
  misc_feature 1..21: note = Synthetic
  source 1..21: mol_type = other RNA
caaagacggccaaggagaagg

SEQ ID NO: 5560 - RNA, 21 nt, synthetic construct
  misc_feature 1..21: note = Synthetic
  source 1..21: mol_type = other RNA
caaagctctggcaggcaatgc

SEQ ID NO: 5561 - RNA, 21 nt, synthetic construct
  misc_feature 1..21: note = Synthetic
  source 1..21: mol_type = other RNA
caaaggaagacgaggagcacg

SEQ ID NO: 5562 - RNA, 21 nt, synthetic construct
  misc_feature 1..21: note = Synthetic
  source 1..21: mol_type = other RNA
caaaggaagacgaggagcact

SEQ ID NO: 5563 - RNA, 21 nt, synthetic construct
  misc_feature 1..21: note = Synthetic
  source 1..21: mol_type = other RNA
caaaggctaacctggctgtct

SEQ ID NO: 5564 - RNA, 21 nt, synthetic construct
  misc_feature 1..21: note = Synthetic
  source 1..21: mol_type = other RNA
caaagtgcaaacataacaaaa

SEQ ID NO: 5565 - RNA, 21 nt, synthetic construct
  misc_feature 1..21: note = Synthetic
  source 1..21: mol_type = other RNA
caaagtgctgggattacaggc

SEQ ID NO: 5566 - RNA, 21 nt, synthetic construct
  misc_feature 1..21: note = Synthetic
  source 1..21: mol_type = other RNA
caaagttgatgctgttgatgt

SEQ ID NO: 5567 - RNA, 21 nt, synthetic construct
  misc_feature 1..21: note = Synthetic
  source 1..21: mol_type = other RNA
caaataatctttgtacataaa

SEQ ID NO: 5568 - RNA, 21 nt, synthetic construct
  misc_feature 1..21: note = Synthetic
  source 1..21: mol_type = other RNA
caaatacagcaaccagggttt

SEQ ID NO: 5569 - RNA, 21 nt, synthetic construct
  misc_feature 1..21: note = Synthetic
  source 1..21: mol_type = other RNA
caaatgccaaatgtacacagt

SEQ ID NO: 5570 - RNA, 21 nt, synthetic construct
  misc_feature 1..21: note = Synthetic
  source 1..21: mol_type = other RNA
caaatgcctgagctcaaacca

SEQ ID NO: 5571 - RNA, 21 nt, synthetic construct
  misc_feature 1..21: note = Synthetic
  source 1..21: mol_type = other RNA
caaatgtacacagtgtacaac

SEQ ID NO: 5572 - RNA, 21 nt, synthetic construct
  misc_feature 1..21: note = Synthetic
  source 1..21: mol_type = other RNA
caaatgtggacctcatcctct

SEQ ID NO: 5573 - RNA, 21 nt, synthetic construct
  misc_feature 1..21: note = Synthetic
  source 1..21: mol_type = other RNA
caaattcattttttaagagat

SEQ ID NO: 5574 - RNA, 21 nt, synthetic construct
  misc_feature 1..21: note = Synthetic
  source 1..21: mol_type = other RNA
caacaagttgacatcggaacc

SEQ ID NO: 5575 - RNA, 21 nt, synthetic construct
  misc_feature 1..21: note = Synthetic
  source 1..21: mol_type = other RNA
caacacacacgacagaaaaca

SEQ ID NO: 5576 - RNA, 21 nt, synthetic construct
  misc_feature 1..21: note = Synthetic
  source 1..21: mol_type = other RNA
caacagagacagtgcccagga

SEQ ID NO: 5577 - RNA, 21 nt, synthetic construct
  misc_feature 1..21: note = Synthetic
  source 1..21: mol_type = other RNA
caacagtaacacggcgatttc

SEQ ID NO: 5578 - RNA, 21 nt, synthetic construct
  misc_feature 1..21: note = Synthetic
  source 1..21: mol_type = other RNA
caaccaatatacaaagtgcaa

SEQ ID NO: 5579 - RNA, 21 nt, synthetic construct
  misc_feature 1..21: note = Synthetic
  source 1..21: mol_type = other RNA
caaccagggtttgcaaaaata

SEQ ID NO: 5580 - RNA, 21 nt, synthetic construct
  misc_feature 1..21: note = Synthetic
  source 1..21: mol_type = other RNA
caacccaagccattgcatggg

SEQ ID NO: 5581 - RNA, 21 nt, synthetic construct
  misc_feature 1..21: note = Synthetic
  source 1..21: mol_type = other RNA
caacccagtagaggcggccac

SEQ ID NO: 5582 - RNA, 21 nt, synthetic construct
  misc_feature 1..21: note = Synthetic
  source 1..21: mol_type = other RNA
caacctccacctcctgggctc

SEQ ID NO: 5583 - RNA, 21 nt, synthetic construct
  misc_feature 1..21: note = Synthetic
  source 1..21: mol_type = other RNA
caacctcgtaaggaaccgagg

SEQ ID NO: 5584 - RNA, 21 nt, synthetic construct
  misc_feature 1..21: note = Synthetic
  source 1..21: mol_type = other RNA
caacctgcccctctctgtccc

SEQ ID NO: 5585 - RNA, 21 nt, synthetic construct
  misc_feature 1..21: note = Synthetic
  source 1..21: mol_type = other RNA
caacgacaagattggggaagt

SEQ ID NO: 5586 - RNA, 21 nt, synthetic construct
  misc_feature 1..21: note = Synthetic
  source 1..21: mol_type = other RNA
caacggggacatcattctccc

SEQ ID NO: 5587 - RNA, 21 nt, synthetic construct
  misc_feature 1..21: note = Synthetic
  source 1..21: mol_type = other RNA
caacgtcgcccagagcttggt

SEQ ID NO: 5588 - RNA, 21 nt, synthetic construct
  misc_feature 1..21: note = Synthetic
  source 1..21: mol_type = other RNA
caacgtttcaacctcgtaagg

SEQ ID NO: 5589 - RNA, 21 nt, synthetic construct
  misc_feature 1..21: note = Synthetic
  source 1..21: mol_type = other RNA
caactcctgaactcaagtgat

SEQ ID NO: 5590 - RNA, 21 nt, synthetic construct
  misc_feature 1..21: note = Synthetic
  source 1..21: mol_type = other RNA
caactctgaactgagaaagtg

SEQ ID NO: 5591 - RNA, 21 nt, synthetic construct
  misc_feature 1..21: note = Synthetic
  source 1..21: mol_type = other RNA
caacttcatcgctcatgtcct

SEQ ID NO: 5592 - RNA, 21 nt, synthetic construct
  misc_feature 1..21: note = Synthetic
  source 1..21: mol_type = other RNA
caagatggtcttccggttgcc

SEQ ID NO: 5593 - RNA, 21 nt, synthetic construct
  misc_feature 1..21: note = Synthetic
  source 1..21: mol_type = other RNA
caagattggggaagtgaatgg

SEQ ID NO: 5594 - RNA, 21 nt, synthetic construct
  misc_feature 1..21: note = Synthetic
  source 1..21: mol_type = other RNA
caagcacgtctcctgggactc

SEQ ID NO: 5595 - RNA, 21 nt, synthetic construct
  misc_feature 1..21: note = Synthetic
  source 1..21: mol_type = other RNA
caagcagtcccggtctgagtc

SEQ ID NO: 5596 - RNA, 21 nt, synthetic construct
  misc_feature 1..21: note = Synthetic
  source 1..21: mol_type = other RNA
caagcattcgttggtcccgca

SEQ ID NO: 5597 - RNA, 21 nt, synthetic construct
  misc_feature 1..21: note = Synthetic
  source 1..21: mol_type = other RNA
caagccattgcatgggcactg

SEQ ID NO: 5598 - RNA, 21 nt, synthetic construct
  misc_feature 1..21: note = Synthetic
  source 1..21: mol_type = other RNA
caagctccgcttcccgggttc

SEQ ID NO: 5599 - RNA, 21 nt, synthetic construct
  misc_feature 1..21: note = Synthetic
  source 1..21: mol_type = other RNA
caagctgggtgctgcagatca

SEQ ID NO: 5600 - RNA, 21 nt, synthetic construct
  misc_feature 1..21: note = Synthetic
  source 1..21: mol_type = other RNA
caaggagaaggggtgggccag

SEQ ID NO: 5601 - RNA, 21 nt, synthetic construct
  misc_feature 1..21: note = Synthetic
  source 1..21: mol_type = other RNA
caaggagaccacgggaatgga

SEQ ID NO: 5602 - RNA, 21 nt, synthetic construct
  misc_feature 1..21: note = Synthetic
  source 1..21: mol_type = other RNA
caaggaggggcggggagattc

SEQ ID NO: 5603 - RNA, 21 nt, synthetic construct
  misc_feature 1..21: note = Synthetic
  source 1..21: mol_type = other RNA
caaggccggcgaggtctcagg

SEQ ID NO: 5604 - RNA, 21 nt, synthetic construct
  misc_feature 1..21: note = Synthetic
  source 1..21: mol_type = other RNA
caaggcgacggtccagcgcaa

SEQ ID NO: 5605 - RNA, 21 nt, synthetic construct
  misc_feature 1..21: note = Synthetic
  source 1..21: mol_type = other RNA
caaggcttgcatagaagaggt

SEQ ID NO: 5606 - RNA, 21 nt, synthetic construct
  misc_feature 1..21: note = Synthetic
  source 1..21: mol_type = other RNA
caaggtaaccgggtgtctcag

SEQ ID NO: 5607 - RNA, 21 nt, synthetic construct
  misc_feature 1..21: note = Synthetic
  source 1..21: mol_type = other RNA
caaggtggggacggaggtgtc

SEQ ID NO: 5608 - RNA, 21 nt, synthetic construct
  misc_feature 1..21: note = Synthetic
  source 1..21: mol_type = other RNA
caagtagctgggatcacaggc

SEQ ID NO: 5609 - RNA, 21 nt, synthetic construct
  misc_feature 1..21: note = Synthetic
  source 1..21: mol_type = other RNA
caagtgatccagctcagcctc

SEQ ID NO: 5610 - RNA, 21 nt, synthetic construct
  misc_feature 1..21: note = Synthetic
  source 1..21: mol_type = other RNA
caagttgacatcggaacctgt

SEQ ID NO: 5611 - RNA, 21 nt, synthetic construct
  misc_feature 1..21: note = Synthetic
  source 1..21: mol_type = other RNA
caataaccccctacacagggc

SEQ ID NO: 5612 - RNA, 21 nt, synthetic construct
  misc_feature 1..21: note = Synthetic
  source 1..21: mol_type = other RNA
caatatacaaagtgcaaacat

SEQ ID NO: 5613 - RNA, 21 nt, synthetic construct
  misc_feature 1..21: note = Synthetic
  source 1..21: mol_type = other RNA
caatcccttgtgacatcttca

SEQ ID NO: 5614 - RNA, 21 nt, synthetic construct
  misc_feature 1..21: note = Synthetic
  source 1..21: mol_type = other RNA
caatctcggctcactgcaagc

SEQ ID NO: 5615 - RNA, 21 nt, synthetic construct
  misc_feature 1..21: note = Synthetic
  source 1..21: mol_type = other RNA
caatgctttggtcttctctgt

SEQ ID NO: 5616 - RNA, 21 nt, synthetic construct
  misc_feature 1..21: note = Synthetic
  source 1..21: mol_type = other RNA
caatggacagagccctcacgc

SEQ ID NO: 5617 - RNA, 21 nt, synthetic construct
  misc_feature 1..21: note = Synthetic
  source 1..21: mol_type = other RNA
caatggcagttctcgatattc

SEQ ID NO: 5618 - RNA, 21 nt, synthetic construct
  misc_feature 1..21: note = Synthetic
  source 1..21: mol_type = other RNA
caattgccaatcccttgtgac

SEQ ID NO: 5619 - RNA, 21 nt, synthetic construct
  misc_feature 1..21: note = Synthetic
  source 1..21: mol_type = other RNA
caatttccagccccagggccc

SEQ ID NO: 5620 - RNA, 21 nt, synthetic construct
  misc_feature 1..21: note = Synthetic
  source 1..21: mol_type = other RNA
cacaaatgccaaatgtacaca

SEQ ID NO: 5621 - RNA, 21 nt, synthetic construct
  misc_feature 1..21: note = Synthetic
  source 1..21: mol_type = other RNA
cacacacgacagaaaacagtg

SEQ ID NO: 5622 - RNA, 21 nt, synthetic construct
  misc_feature 1..21: note = Synthetic
  source 1..21: mol_type = other RNA
cacacagctgcccccgagacc

SEQ ID NO: 5623 - RNA, 21 nt, synthetic construct
  misc_feature 1..21: note = Synthetic
  source 1..21: mol_type = other RNA
cacacagtccagttcgtgcaa

SEQ ID NO: 5624 - RNA, 21 nt, synthetic construct
  misc_feature 1..21: note = Synthetic
  source 1..21: mol_type = other RNA
cacaccagttcactcctcttg

SEQ ID NO: 5625 - RNA, 21 nt, synthetic construct
  misc_feature 1..21: note = Synthetic
  source 1..21: mol_type = other RNA
cacaccattcaggcccccttt

SEQ ID NO: 5626 - RNA, 21 nt, synthetic construct
  misc_feature 1..21: note = Synthetic
  source 1..21: mol_type = other RNA
cacaccattctcctgcctcag

SEQ ID NO: 5627 - RNA, 21 nt, synthetic construct
  misc_feature 1..21: note = Synthetic
  source 1..21: mol_type = other RNA
cacacctgggtgcaggccacg

SEQ ID NO: 5628 - RNA, 21 nt, synthetic construct
  misc_feature 1..21: note = Synthetic
  source 1..21: mol_type = other RNA
cacacgacagaaaacagtgca

SEQ ID NO: 5629 - RNA, 21 nt, synthetic construct
  misc_feature 1..21: note = Synthetic
  source 1..21: mol_type = other RNA
cacactgccggctgccatgga

SEQ ID NO: 5630 - RNA, 21 nt, synthetic construct
  misc_feature 1..21: note = Synthetic
  source 1..21: mol_type = other RNA
cacactggcacttgtagccac

SEQ ID NO: 5631 - RNA, 21 nt, synthetic construct
  misc_feature 1..21: note = Synthetic
  source 1..21: mol_type = other RNA
cacagacgaactgccgagaga

SEQ ID NO: 5632 - RNA, 21 nt, synthetic construct
  misc_feature 1..21: note = Synthetic
  source 1..21: mol_type = other RNA
cacagagcacagcggaaaccg

SEQ ID NO: 5633 - RNA, 21 nt, synthetic construct
  misc_feature 1..21: note = Synthetic
  source 1..21: mol_type = other RNA
cacagatactggcagccgcca

SEQ ID NO: 5634 - RNA, 21 nt, synthetic construct
  misc_feature 1..21: note = Synthetic
  source 1..21: mol_type = other RNA
cacagccagcccgtcgggggc

SEQ ID NO: 5635 - RNA, 21 nt, synthetic construct
  misc_feature 1..21: note = Synthetic
  source 1..21: mol_type = other RNA
cacagccttgcaggccttcgt

SEQ ID NO: 5636 - RNA, 21 nt, synthetic construct
  misc_feature 1..21: note = Synthetic
  source 1..21: mol_type = other RNA
cacagcgcagttttcctcgtc

SEQ ID NO: 5637 - RNA, 21 nt, synthetic construct
  misc_feature 1..21: note = Synthetic
  source 1..21: mol_type = other RNA
cacagcgccagctggagtgga

SEQ ID NO: 5638 - RNA, 21 nt, synthetic construct
  misc_feature 1..21: note = Synthetic
  source 1..21: mol_type = other RNA
cacagcggaaaccggggactt

SEQ ID NO: 5639 - RNA, 21 nt, synthetic construct
  misc_feature 1..21: note = Synthetic
  source 1..21: mol_type = other RNA
cacagctgaagtccccggatt

SEQ ID NO: 5640 - RNA, 21 nt, synthetic construct
  misc_feature 1..21: note = Synthetic
  source 1..21: mol_type = other RNA
cacagctgcccccgagaccag

SEQ ID NO: 5641 - RNA, 21 nt, synthetic construct
  misc_feature 1..21: note = Synthetic
  source 1..21: mol_type = other RNA
cacagctgggggatgcaggtg

SEQ ID NO: 5642 - RNA, 21 nt, synthetic construct
  misc_feature 1..21: note = Synthetic
  source 1..21: mol_type = other RNA
cacaggacagccttgctcgtc

SEQ ID NO: 5643 - RNA, 21 nt, synthetic construct
  misc_feature 1..21: note = Synthetic
  source 1..21: mol_type = other RNA
cacaggcacgtgccaccgtac

SEQ ID NO: 5644 - RNA, 21 nt, synthetic construct
  misc_feature 1..21: note = Synthetic
  source 1..21: mol_type = other RNA
cacaggcactcgtagccgatc

SEQ ID NO: 5645 - RNA, 21 nt, synthetic construct
  misc_feature 1..21: note = Synthetic
  source 1..21: mol_type = other RNA
cacagggccccgagaatagtc

SEQ ID NO: 5646 - RNA, 21 nt, synthetic construct
  misc_feature 1..21: note = Synthetic
  source 1..21: mol_type = other RNA
cacaggtgagcaccgggcagg

SEQ ID NO: 5647 - RNA, 21 nt, synthetic construct
  misc_feature 1..21: note = Synthetic
  source 1..21: mol_type = other RNA
cacagtaagacattcaggcta

SEQ ID NO: 5648 - RNA, 21 nt, synthetic construct
  misc_feature 1..21: note = Synthetic
  source 1..21: mol_type = other RNA
cacagtccagttcgtgcaaat

SEQ ID NO: 5649 - RNA, 21 nt, synthetic construct
  misc_feature 1..21: note = Synthetic
  source 1..21: mol_type = other RNA
cacagtgtacaactctgaact

SEQ ID NO: 5650 - RNA, 21 nt, synthetic construct
  misc_feature 1..21: note = Synthetic
  source 1..21: mol_type = other RNA
cacagtgttttgtccctgggg

SEQ ID NO: 5651 - RNA, 21 nt, synthetic construct
  misc_feature 1..21: note = Synthetic
  source 1..21: mol_type = other RNA
cacatacccatcaacgacaag

SEQ ID NO: 5652 - RNA, 21 nt, synthetic construct
  misc_feature 1..21: note = Synthetic
  source 1..21: mol_type = other RNA
cacattaacgcagccaacttc

SEQ ID NO: 5653 - RNA, 21 nt, synthetic construct
  misc_feature 1..21: note = Synthetic
  source 1..21: mol_type = other RNA
caccacgatggcccttggctt

SEQ ID NO: 5654 - RNA, 21 nt, synthetic construct
  misc_feature 1..21: note = Synthetic
  source 1..21: mol_type = other RNA
caccacgcccggctaattttt

SEQ ID NO: 5655 - RNA, 21 nt, synthetic construct
  misc_feature 1..21: note = Synthetic
  source 1..21: mol_type = other RNA
caccacggattcagccagatc

SEQ ID NO: 5656 - RNA, 21 nt, synthetic construct
  misc_feature 1..21: note = Synthetic
  source 1..21: mol_type = other RNA
caccagcgagtagatgtccac

SEQ ID NO: 5657 - RNA, 21 nt, synthetic construct
  misc_feature 1..21: note = Synthetic
  source 1..21: mol_type = other RNA
caccagctggaagccgtcggg

SEQ ID NO: 5658 - RNA, 21 nt, synthetic construct
  misc_feature 1..21: note = Synthetic
  source 1..21: mol_type = other RNA
caccaggctggtgtcctgaca

SEQ ID NO: 5659 - RNA, 21 nt, synthetic construct
  misc_feature 1..21: note = Synthetic
  source 1..21: mol_type = other RNA
caccagttcactcctcttggc

SEQ ID NO: 5660 - RNA, 21 nt, synthetic construct
  misc_feature 1..21: note = Synthetic
  source 1..21: mol_type = other RNA
caccatcacagcgccagctgg

SEQ ID NO: 5661 - RNA, 21 nt, synthetic construct
  misc_feature 1..21: note = Synthetic
  source 1..21: mol_type = other RNA
caccatgcatggttttttttt

SEQ ID NO: 5662 - RNA, 21 nt, synthetic construct
  misc_feature 1..21: note = Synthetic
  source 1..21: mol_type = other RNA
caccattcaggccccctttct

SEQ ID NO: 5663 - RNA, 21 nt, synthetic construct
  misc_feature 1..21: note = Synthetic
  source 1..21: mol_type = other RNA
caccattctcctgcctcagcc

SEQ ID NO: 5664 - RNA, 21 nt, synthetic construct
  misc_feature 1..21: note = Synthetic
  source 1..21: mol_type = other RNA
cacccatctcccagaagccac

SEQ ID NO: 5665 - RNA, 21 nt, synthetic construct
  misc_feature 1..21: note = Synthetic
  source 1..21: mol_type = other RNA
cacccgcctcggcctcccaaa

SEQ ID NO: 5666 - RNA, 21 nt, synthetic construct
  misc_feature 1..21: note = Synthetic
  source 1..21: mol_type = other RNA
caccctccaggttcacgcaga

SEQ ID NO: 5667 - RNA, 21 nt, synthetic construct
  misc_feature 1..21: note = Synthetic
  source 1..21: mol_type = other RNA
caccgggcaggaggcctcgtc

SEQ ID NO: 5668 - RNA, 21 nt, synthetic construct
  misc_feature 1..21: note = Synthetic
  source 1..21: mol_type = other RNA
caccgtacccagctgattttt

SEQ ID NO: 5669 - RNA, 21 nt, synthetic construct
  misc_feature 1..21: note = Synthetic
  source 1..21: mol_type = other RNA
caccgtgcatgttttaaacac

SEQ ID NO: 5670 - RNA, 21 nt, synthetic construct
  misc_feature 1..21: note = Synthetic
  source 1..21: mol_type = other RNA
caccgtggtgagcccaggggt

SEQ ID NO: 5671 - RNA, 21 nt, synthetic construct
  misc_feature 1..21: note = Synthetic
  source 1..21: mol_type = other RNA
cacctcagcctcgccatgcct

SEQ ID NO: 5672 - RNA, 21 nt, synthetic construct
  misc_feature 1..21: note = Synthetic
  source 1..21: mol_type = other RNA
cacctccagaactgaggaatg

SEQ ID NO: 5673 - RNA, 21 nt, synthetic construct
  misc_feature 1..21: note = Synthetic
  source 1..21: mol_type = other RNA
cacctccgtgtccagagcgac

SEQ ID NO: 5674 - RNA, 21 nt, synthetic construct
  misc_feature 1..21: note = Synthetic
  source 1..21: mol_type = other RNA
cacctcctgggctcaggcgat

SEQ ID NO: 5675 - RNA, 21 nt, synthetic construct
  misc_feature 1..21: note = Synthetic
  source 1..21: mol_type = other RNA
cacctcgaaagacactgggtg

SEQ ID NO: 5676 - RNA, 21 nt, synthetic construct
  misc_feature 1..21: note = Synthetic
  source 1..21: mol_type = other RNA
cacctgggtgcaggccacgtg

SEQ ID NO: 5677 - RNA, 21 nt, synthetic construct
  misc_feature 1..21: note = Synthetic
  source 1..21: mol_type = other RNA
cacctgtgtctggccaaattc

SEQ ID NO: 5678 - RNA, 21 nt, synthetic construct
  misc_feature 1..21: note = Synthetic
  source 1..21: mol_type = other RNA
cacgacagaaaacagtgcaaa

SEQ ID NO: 5679 - RNA, 21 nt, synthetic construct
  misc_feature 1..21: note = Synthetic
  source 1..21: mol_type = other RNA
cacgacagcctcaaatgcctg

SEQ ID NO: 5680 - RNA, 21 nt, synthetic construct
  misc_feature 1..21: note = Synthetic
  source 1..21: mol_type = other RNA
cacgacctgctgtgtcctagc

SEQ ID NO: 5681 - RNA, 21 nt, synthetic construct
  misc_feature 1..21: note = Synthetic
  source 1..21: mol_type = other RNA
cacgaggaaaggaagaaacca

SEQ ID NO: 5682 - RNA, 21 nt, synthetic construct
  misc_feature 1..21: note = Synthetic
  source 1..21: mol_type = other RNA
cacgatcacggctttgaagtc

SEQ ID NO: 5683 - RNA, 21 nt, synthetic construct
  misc_feature 1..21: note = Synthetic
  source 1..21: mol_type = other RNA
cacgatggcccttggcttgga

SEQ ID NO: 5684 - RNA, 21 nt, synthetic construct
  misc_feature 1..21: note = Synthetic
  source 1..21: mol_type = other RNA
cacgatggggaggacaatgga

SEQ ID NO: 5685 - RNA, 21 nt, synthetic construct
  misc_feature 1..21: note = Synthetic
  source 1..21: mol_type = other RNA
cacgcagagctggctgcaggt

SEQ ID NO: 5686 - RNA, 21 nt, synthetic construct
  misc_feature 1..21: note = Synthetic
  source 1..21: mol_type = other RNA
cacgccacgtcatcctccaga

SEQ ID NO: 5687 - RNA, 21 nt, synthetic construct
  misc_feature 1..21: note = Synthetic
  source 1..21: mol_type = other RNA
cacgcccggctaattttttgt

SEQ ID NO: 5688 - RNA, 21 nt, synthetic construct
  misc_feature 1..21: note = Synthetic
  source 1..21: mol_type = other RNA
cacgcccttggtatccgcaac

SEQ ID NO: 5689 - RNA, 21 nt, synthetic construct
  misc_feature 1..21: note = Synthetic
  source 1..21: mol_type = other RNA
cacgcgggagtctgacggagg

SEQ ID NO: 5690 - RNA, 21 nt, synthetic construct
  misc_feature 1..21: note = Synthetic
  source 1..21: mol_type = other RNA
cacgctactgggcttcttctc

SEQ ID NO: 5691 - RNA, 21 nt, synthetic construct
  misc_feature 1..21: note = Synthetic
  source 1..21: mol_type = other RNA
cacgctctgtcacacagctgc

SEQ ID NO: 5692 - RNA, 21 nt, synthetic construct
  misc_feature 1..21: note = Synthetic
  source 1..21: mol_type = other RNA
cacggattcagccagatcatt

SEQ ID NO: 5693 - RNA, 21 nt, synthetic construct
  misc_feature 1..21: note = Synthetic
  source 1..21: mol_type = other RNA
cacggccaaggtaaccgggtg

SEQ ID NO: 5694 - RNA, 21 nt, synthetic construct
  misc_feature 1..21: note = Synthetic
  source 1..21: mol_type = other RNA
cacggcccccacagctgaagt

SEQ ID NO: 5695 - RNA, 21 nt, synthetic construct
  misc_feature 1..21: note = Synthetic
  source 1..21: mol_type = other RNA
cacggcgatttcagaaagaac

SEQ ID NO: 5696 - RNA, 21 nt, synthetic construct
  misc_feature 1..21: note = Synthetic
  source 1..21: mol_type = other RNA
cacggctttgaagtcccggtc

SEQ ID NO: 5697 - RNA, 21 nt, synthetic construct
  misc_feature 1..21: note = Synthetic
  source 1..21: mol_type = other RNA
cacgggaatggaagtgggtag

SEQ ID NO: 5698 - RNA, 21 nt, synthetic construct
  misc_feature 1..21: note = Synthetic
  source 1..21: mol_type = other RNA
cacgggctttccctggcctgg

SEQ ID NO: 5699 - RNA, 21 nt, synthetic construct
  misc_feature 1..21: note = Synthetic
  source 1..21: mol_type = other RNA
cacggtggagagaaactcaaa

SEQ ID NO: 5700 - RNA, 21 nt, synthetic construct
  misc_feature 1..21: note = Synthetic
  source 1..21: mol_type = other RNA
cacggttccctgcactggggg

SEQ ID NO: 5701 - RNA, 21 nt, synthetic construct
  misc_feature 1..21: note = Synthetic
  source 1..21: mol_type = other RNA
cacgtaaagacccctacagcg

SEQ ID NO: 5702 - RNA, 21 nt, synthetic construct
  misc_feature 1..21: note = Synthetic
  source 1..21: mol_type = other RNA
cacgtcatcctccagactgac

SEQ ID NO: 5703 - RNA, 21 nt, synthetic construct
  misc_feature 1..21: note = Synthetic
  source 1..21: mol_type = other RNA
cacgtctcctgggactcatca

SEQ ID NO: 5704 - RNA, 21 nt, synthetic construct
  misc_feature 1..21: note = Synthetic
  source 1..21: mol_type = other RNA
cacgtcttgggggagcacgtc

SEQ ID NO: 5705 - RNA, 21 nt, synthetic construct
  misc_feature 1..21: note = Synthetic
  source 1..21: mol_type = other RNA
cacgtcttggggggacagcct

SEQ ID NO: 5706 - RNA, 21 nt, synthetic construct
  misc_feature 1..21: note = Synthetic
  source 1..21: mol_type = other RNA
cacgtgccaccgtacccagct

SEQ ID NO: 5707 - RNA, 21 nt, synthetic construct
  misc_feature 1..21: note = Synthetic
  source 1..21: mol_type = other RNA
cacgtggctgaagatctcggc

SEQ ID NO: 5708 - RNA, 21 nt, synthetic construct
  misc_feature 1..21: note = Synthetic
  source 1..21: mol_type = other RNA
cacgtgtcctcacggccaagg

SEQ ID NO: 5709 - RNA, 21 nt, synthetic construct
  misc_feature 1..21: note = Synthetic
  source 1..21: mol_type = other RNA
cacgtgttagccaggatggtc

SEQ ID NO: 5710 - RNA, 21 nt, synthetic construct
  misc_feature 1..21: note = Synthetic
  source 1..21: mol_type = other RNA
cacgttcctcaggttggggat

SEQ ID NO: 5711 - RNA, 21 nt, synthetic construct
  misc_feature 1..21: note = Synthetic
  source 1..21: mol_type = other RNA
cacgttgactcctgagtttag

SEQ ID NO: 5712 - RNA, 21 nt, synthetic construct
  misc_feature 1..21: note = Synthetic
  source 1..21: mol_type = other RNA
cactaggtgggcggacataaa

SEQ ID NO: 5713 - RNA, 21 nt, synthetic construct
  misc_feature 1..21: note = Synthetic
  source 1..21: mol_type = other RNA
cactatctccaccgtggtgag

SEQ ID NO: 5714 - RNA, 21 nt, synthetic construct
  misc_feature 1..21: note = Synthetic
  source 1..21: mol_type = other RNA
cactatctgtacagggacgca

SEQ ID NO: 5715 - RNA, 21 nt, synthetic construct
  misc_feature 1..21: note = Synthetic
  source 1..21: mol_type = other RNA
cactcagcgctgccatcgcag

SEQ ID NO: 5716 - RNA, 21 nt, synthetic construct
  misc_feature 1..21: note = Synthetic
  source 1..21: mol_type = other RNA
cactcatacatacaacgggga

SEQ ID NO: 5717 - RNA, 21 nt, synthetic construct
  misc_feature 1..21: note = Synthetic
  source 1..21: mol_type = other RNA
cactcatccgagccatcttcg

SEQ ID NO: 5718 - RNA, 21 nt, synthetic construct
  misc_feature 1..21: note = Synthetic
  source 1..21: mol_type = other RNA
cactcatcgatatcgcactct

SEQ ID NO: 5719 - RNA, 21 nt, synthetic construct
  misc_feature 1..21: note = Synthetic
  source 1..21: mol_type = other RNA
cactcatcgatatcttcgcat

SEQ ID NO: 5720 - RNA, 21 nt, synthetic construct
  misc_feature 1..21: note = Synthetic
  source 1..21: mol_type = other RNA
cactcctcttggctgggtgag

SEQ ID NO: 5721 - RNA, 21 nt, synthetic construct
  misc_feature 1..21: note = Synthetic
  source 1..21: mol_type = other RNA
cactcgccacttaggcagtgg

SEQ ID NO: 5722 - RNA, 21 nt, synthetic construct
  misc_feature 1..21: note = Synthetic
  source 1..21: mol_type = other RNA
cactcgtagccgatcttaagg

SEQ ID NO: 5723 - RNA, 21 nt, synthetic construct
  misc_feature 1..21: note = Synthetic
  source 1..21: mol_type = other RNA
cactctttgatgggttcatct

SEQ ID NO: 5724 - RNA, 21 nt, synthetic construct
  misc_feature 1..21: note = Synthetic
  source 1..21: mol_type = other RNA
cactgaaaatggcttcgttga

SEQ ID NO: 5725 - RNA, 21 nt, synthetic construct
  misc_feature 1..21: note = Synthetic
  source 1..21: mol_type = other RNA
cactgaacaaatacagcaacc

SEQ ID NO: 5726 - RNA, 21 nt, synthetic construct
  misc_feature 1..21: note = Synthetic
  source 1..21: mol_type = other RNA
cactgaatgttttcagtcacc

SEQ ID NO: 5727 - RNA, 21 nt, synthetic construct
  misc_feature 1..21: note = Synthetic
  source 1..21: mol_type = other RNA
cactgaggagatctagggtga

SEQ ID NO: 5728 - RNA, 21 nt, synthetic construct
  misc_feature 1..21: note = Synthetic
  source 1..21: mol_type = other RNA
cactgcaacctccacctcctg

SEQ ID NO: 5729 - RNA, 21 nt, synthetic construct
  misc_feature 1..21: note = Synthetic
  source 1..21: mol_type = other RNA
cactgcaagctccgcttcccg

SEQ ID NO: 5730 - RNA, 21 nt, synthetic construct
  misc_feature 1..21: note = Synthetic
  source 1..21: mol_type = other RNA
cactgcagcctcagcctctct

SEQ ID NO: 5731 - RNA, 21 nt, synthetic construct
  misc_feature 1..21: note = Synthetic
  source 1..21: mol_type = other RNA
cactgcagcctcagcctctgt

SEQ ID NO: 5732 - RNA, 21 nt, synthetic construct
  misc_feature 1..21: note = Synthetic
  source 1..21: mol_type = other RNA
cactgcagtccccgccgcggc

SEQ ID NO: 5733 - RNA, 21 nt, synthetic construct
  misc_feature 1..21: note = Synthetic
  source 1..21: mol_type = other RNA
cactgccggctgccatggatg

SEQ ID NO: 5734 - RNA, 21 nt, synthetic construct
  misc_feature 1..21: note = Synthetic
  source 1..21: mol_type = other RNA
cactgcgcccggcctcaccgt

SEQ ID NO: 5735 - RNA, 21 nt, synthetic construct
  misc_feature 1..21: note = Synthetic
  source 1..21: mol_type = other RNA
cactggaactcgtttctttcg

SEQ ID NO: 5736 - RNA, 21 nt, synthetic construct
  misc_feature 1..21: note = Synthetic
  source 1..21: mol_type = other RNA
cactggaagctggcgggacca

SEQ ID NO: 5737 - RNA, 21 nt, synthetic construct
  misc_feature 1..21: note = Synthetic
  source 1..21: mol_type = other RNA
cactggaattcgtcagggcga

SEQ ID NO: 5738 - RNA, 21 nt, synthetic construct
  misc_feature 1..21: note = Synthetic
  source 1..21: mol_type = other RNA
cactggcacttgtagccaccc

SEQ ID NO: 5739 - RNA, 21 nt, synthetic construct
  misc_feature 1..21: note = Synthetic
  source 1..21: mol_type = other RNA
cactgggggggacacagtgtt

SEQ ID NO: 5740 - RNA, 21 nt, synthetic construct
  misc_feature 1..21: note = Synthetic
  source 1..21: mol_type = other RNA
cactgggtgggtcatgattcg

SEQ ID NO: 5741 - RNA, 21 nt, synthetic construct
  misc_feature 1..21: note = Synthetic
  source 1..21: mol_type = other RNA
cactgtagggagaggcacgct

SEQ ID NO: 5742 - RNA, 21 nt, synthetic construct
  misc_feature 1..21: note = Synthetic
  source 1..21: mol_type = other RNA
cactgtccgaagcctgttctg

SEQ ID NO: 5743 - RNA, 21 nt, synthetic construct
  misc_feature 1..21: note = Synthetic
  source 1..21: mol_type = other RNA
cactgtctctccggacatcag

SEQ ID NO: 5744 - RNA, 21 nt, synthetic construct
  misc_feature 1..21: note = Synthetic
  source 1..21: mol_type = other RNA
cacttaataaatattaagggt

SEQ ID NO: 5745 - RNA, 21 nt, synthetic construct
  misc_feature 1..21: note = Synthetic
  source 1..21: mol_type = other RNA
cacttaggcagtggaactcga

SEQ ID NO: 5746 - RNA, 21 nt, synthetic construct
  misc_feature 1..21: note = Synthetic
  source 1..21: mol_type = other RNA
cacttcccatcgtggcagcga

SEQ ID NO: 5747 - RNA, 21 nt, synthetic construct
  misc_feature 1..21: note = Synthetic
  source 1..21: mol_type = other RNA
cacttgaacttgttgggtccc

SEQ ID NO: 5748 - RNA, 21 nt, synthetic construct
  misc_feature 1..21: note = Synthetic
  source 1..21: mol_type = other RNA
cacttgcttctctgggcctga

SEQ ID NO: 5749 - RNA, 21 nt, synthetic construct
  misc_feature 1..21: note = Synthetic
  source 1..21: mol_type = other RNA
cacttggccatcgcacctcca

SEQ ID NO: 5750 - RNA, 21 nt, synthetic construct
  misc_feature 1..21: note = Synthetic
  source 1..21: mol_type = other RNA
cacttgtagccaccctccagg

SEQ ID NO: 5751 - RNA, 21 nt, synthetic construct
  misc_feature 1..21: note = Synthetic
  source 1..21: mol_type = other RNA
cacttgtaggagatgcatttc

SEQ ID NO: 5752 - RNA, 21 nt, synthetic construct
  misc_feature 1..21: note = Synthetic
  source 1..21: mol_type = other RNA
cagaaaacagtgcaaaataat

SEQ ID NO: 5753 - RNA, 21 nt, synthetic construct
  misc_feature 1..21: note = Synthetic
  source 1..21: mol_type = other RNA
cagaaagaacctgaagtcccg

SEQ ID NO: 5754 - RNA, 21 nt, synthetic construct
  misc_feature 1..21: note = Synthetic
  source 1..21: mol_type = other RNA
cagaaaggcttatcacggttc

SEQ ID NO: 5755 - RNA, 21 nt, synthetic construct
  misc_feature 1..21: note = Synthetic
  source 1..21: mol_type = other RNA
cagaactgaggaatgcagcgg

SEQ ID NO: 5756 - RNA, 21 nt, synthetic construct
  misc_feature 1..21: note = Synthetic
  source 1..21: mol_type = other RNA
cagaagccactcatacataca

SEQ ID NO: 5757 - RNA, 21 nt, synthetic construct
  misc_feature 1..21: note = Synthetic
  source 1..21: mol_type = other RNA
cagacaagcacgtctcctggg

SEQ ID NO: 5758 - RNA, 21 nt, synthetic construct
  misc_feature 1..21: note = Synthetic
  source 1..21: mol_type = other RNA
cagacagccttgctcgtctga

SEQ ID NO: 5759 - RNA, 21 nt, synthetic construct
  misc_feature 1..21: note = Synthetic
  source 1..21: mol_type = other RNA
cagaccaaggaggggcgggga

SEQ ID NO: 5760 - RNA, 21 nt, synthetic construct
  misc_feature 1..21: note = Synthetic
  source 1..21: mol_type = other RNA
cagaccagtagattctattgc

SEQ ID NO: 5761 - RNA, 21 nt, synthetic construct
  misc_feature 1..21: note = Synthetic
  source 1..21: mol_type = other RNA
cagacccacttgtaggagatg

SEQ ID NO: 5762 - RNA, 21 nt, synthetic construct
  misc_feature 1..21: note = Synthetic
  source 1..21: mol_type = other RNA
cagacgaactgccgagagatg

SEQ ID NO: 5763 - RNA, 21 nt, synthetic construct
  misc_feature 1..21: note = Synthetic
  source 1..21: mol_type = other RNA
cagacgtgggaacagccgccg

SEQ ID NO: 5764 - RNA, 21 nt, synthetic construct
  misc_feature 1..21: note = Synthetic
  source 1..21: mol_type = other RNA
cagactgaccatcgaggggta

SEQ ID NO: 5765 - RNA, 21 nt, synthetic construct
  misc_feature 1..21: note = Synthetic
  source 1..21: mol_type = other RNA
cagactgaccatctgtctcga

SEQ ID NO: 5766 - RNA, 21 nt, synthetic construct
  misc_feature 1..21: note = Synthetic
  source 1..21: mol_type = other RNA
cagactgcggactgcagtggc

SEQ ID NO: 5767 - RNA, 21 nt, synthetic construct
  misc_feature 1..21: note = Synthetic
  source 1..21: mol_type = other RNA
cagactggaggatttatttat

SEQ ID NO: 5768 - RNA, 21 nt, synthetic construct
  misc_feature 1..21: note = Synthetic
  source 1..21: mol_type = other RNA
cagactttgtccagggtgatg

SEQ ID NO: 5769 - RNA, 21 nt, synthetic construct
  misc_feature 1..21: note = Synthetic
  source 1..21: mol_type = other RNA
cagagacagtgcccaggacag

SEQ ID NO: 5770 - RNA, 21 nt, synthetic construct
  misc_feature 1..21: note = Synthetic
  source 1..21: mol_type = other RNA
cagagacccagctccgtggcg

SEQ ID NO: 5771 - RNA, 21 nt, synthetic construct
  misc_feature 1..21: note = Synthetic
  source 1..21: mol_type = other RNA
cagagcacagcggaaaccggg

SEQ ID NO: 5772 - RNA, 21 nt, synthetic construct
  misc_feature 1..21: note = Synthetic
  source 1..21: mol_type = other RNA
cagagcactggaattcgtcag

SEQ ID NO: 5773 - RNA, 21 nt, synthetic construct
  misc_feature 1..21: note = Synthetic
  source 1..21: mol_type = other RNA
cagagccatcctggcactcag

SEQ ID NO: 5774 - RNA, 21 nt, synthetic construct
  misc_feature 1..21: note = Synthetic
  source 1..21: mol_type = other RNA
cagagccctcacgctactggg

SEQ ID NO: 5775 - RNA, 21 nt, synthetic construct
  misc_feature 1..21: note = Synthetic
  source 1..21: mol_type = other RNA
cagagcgaccacgttcctcag

SEQ ID NO: 5776 - RNA, 21 nt, synthetic construct
  misc_feature 1..21: note = Synthetic
  source 1..21: mol_type = other RNA
cagagctggctgcaggtgtcg

SEQ ID NO: 5777 - RNA, 21 nt, synthetic construct
  misc_feature 1..21: note = Synthetic
  source 1..21: mol_type = other RNA
cagagcttggtgagacattgt

SEQ ID NO: 5778 - RNA, 21 nt, synthetic construct
  misc_feature 1..21: note = Synthetic
  source 1..21: mol_type = other RNA
cagaggcaataaccccctaca

SEQ ID NO: 5779 - RNA, 21 nt, synthetic construct
  misc_feature 1..21: note = Synthetic
  source 1..21: mol_type = other RNA
cagaggccatgggctgctgat

SEQ ID NO: 5780 - RNA, 21 nt, synthetic construct
  misc_feature 1..21: note = Synthetic
  source 1..21: mol_type = other RNA
cagagtcggtccagtagatgt

SEQ ID NO: 5781 - RNA, 21 nt, synthetic construct
  misc_feature 1..21: note = Synthetic
  source 1..21: mol_type = other RNA
cagagtgtcacattaacgcag

SEQ ID NO: 5782 - RNA, 21 nt, synthetic construct
  misc_feature 1..21: note = Synthetic
  source 1..21: mol_type = other RNA
cagagtgtcagacagccttgc

SEQ ID NO: 5783 - RNA, 21 nt, synthetic construct
  misc_feature 1..21: note = Synthetic
  source 1..21: mol_type = other RNA
cagatactggcagccgccatt

SEQ ID NO: 5784 - RNA, 21 nt, synthetic construct
  misc_feature 1..21: note = Synthetic
  source 1..21: mol_type = other RNA
cagatcattctctgggacagg

SEQ ID NO: 5785 - RNA, 21 nt, synthetic construct
  misc_feature 1..21: note = Synthetic
  source 1..21: mol_type = other RNA
cagatcatttccgacgccatg

SEQ ID NO: 5786 - RNA, 21 nt, synthetic construct
  misc_feature 1..21: note = Synthetic
  source 1..21: mol_type = other RNA
cagatgaataaatatataaaa

SEQ ID NO: 5787 - RNA, 21 nt, synthetic construct
  misc_feature 1..21: note = Synthetic
  source 1..21: mol_type = other RNA
cagatgttcacgccacgtcat

SEQ ID NO: 5788 - RNA, 21 nt, synthetic construct
  misc_feature 1..21: note = Synthetic
  source 1..21: mol_type = other RNA
cagatttgtccttgcagtcgg

SEQ ID NO: 5789 - RNA, 21 nt, synthetic construct
  misc_feature 1..21: note = Synthetic
  source 1..21: mol_type = other RNA
cagcaaccagggtttgcaaaa

SEQ ID NO: 5790 - RNA, 21 nt, synthetic construct
  misc_feature 1..21: note = Synthetic
  source 1..21: mol_type = other RNA
cagcaacgtcgcccagagctt

SEQ ID NO: 5791 - RNA, 21 nt, synthetic construct
  misc_feature 1..21: note = Synthetic
  source 1..21: mol_type = other RNA
cagcagcatgccgtccgggca

SEQ ID NO: 5792 - RNA, 21 nt, synthetic construct
  misc_feature 1..21: note = Synthetic
  source 1..21: mol_type = other RNA
cagcatgccgtccgggcaggc

SEQ ID NO: 5793 - RNA, 21 nt, synthetic construct
  misc_feature 1..21: note = Synthetic
  source 1..21: mol_type = other RNA
cagccaacaagttgacatcgg

SEQ ID NO: 5794 - RNA, 21 nt, synthetic construct
  misc_feature 1..21: note = Synthetic
  source 1..21: mol_type = other RNA
cagccaacttcatcgctcatg

SEQ ID NO: 5795 - RNA, 21 nt, synthetic construct
  misc_feature 1..21: note = Synthetic
  source 1..21: mol_type = other RNA
cagccacacctgggtgcaggc

SEQ ID NO: 5796 - RNA, 21 nt, synthetic construct
  misc_feature 1..21: note = Synthetic
  source 1..21: mol_type = other RNA
cagccagatcatttccgacgc

SEQ ID NO: 5797 - RNA, 21 nt, synthetic construct
  misc_feature 1..21: note = Synthetic
  source 1..21: mol_type = other RNA
cagccagcccgtcgggggcct

SEQ ID NO: 5798 - RNA, 21 nt, synthetic construct
  misc_feature 1..21: note = Synthetic
  source 1..21: mol_type = other RNA
cagccccagggccccatgctc

SEQ ID NO: 5799 - RNA, 21 nt, synthetic construct
  misc_feature 1..21: note = Synthetic
  source 1..21: mol_type = other RNA
cagcccgtcgggggcctggat

SEQ ID NO: 5800 - RNA, 21 nt, synthetic construct
  misc_feature 1..21: note = Synthetic
  source 1..21: mol_type = other RNA
cagccgccattgctcagggtg

SEQ ID NO: 5801 - RNA, 21 nt, synthetic construct
  misc_feature 1..21: note = Synthetic
  source 1..21: mol_type = other RNA
cagccgccgttgttgtccaag

SEQ ID NO: 5802 - RNA, 21 nt, synthetic construct
  misc_feature 1..21: note = Synthetic
  source 1..21: mol_type = other RNA
cagccgggaggtgtcgggaac

SEQ ID NO: 5803 - RNA, 21 nt, synthetic construct
  misc_feature 1..21: note = Synthetic
  source 1..21: mol_type = other RNA
cagcctcaaatgcctgagctc

SEQ ID NO: 5804 - RNA, 21 nt, synthetic construct
  misc_feature 1..21: note = Synthetic
  source 1..21: mol_type = other RNA
cagcctcagcctctcttggct

SEQ ID NO: 5805 - RNA, 21 nt, synthetic construct
  misc_feature 1..21: note = Synthetic
  source 1..21: mol_type = other RNA
cagcctcagcctctgtgaggc

SEQ ID NO: 5806 - RNA, 21 nt, synthetic construct
  misc_feature 1..21: note = Synthetic
  source 1..21: mol_type = other RNA
cagcctcccaaagtgctggga

SEQ ID NO: 5807 - RNA, 21 nt, synthetic construct
  misc_feature 1..21: note = Synthetic
  source 1..21: mol_type = other RNA
cagcctcccaagtagctggga

SEQ ID NO: 5808 - RNA, 21 nt, synthetic construct
  misc_feature 1..21: note = Synthetic
  source 1..21: mol_type = other RNA
cagcctcccgagtagctggga

SEQ ID NO: 5809 - RNA, 21 nt, synthetic construct
  misc_feature 1..21: note = Synthetic
  source 1..21: mol_type = other RNA
cagcctcgccatgcctggcca

SEQ ID NO: 5810 - RNA, 21 nt, synthetic construct
  misc_feature 1..21: note = Synthetic
  source 1..21: mol_type = other RNA
cagcctctcttggctgggtga

SEQ ID NO: 5811 - RNA, 21 nt, synthetic construct
  misc_feature 1..21: note = Synthetic
  source 1..21: mol_type = other RNA
cagcctctgccaggcagtgtc

SEQ ID NO: 5812 - RNA, 21 nt, synthetic construct
  misc_feature 1..21: note = Synthetic
  source 1..21: mol_type = other RNA
cagcctctgtgaggcagctcc

SEQ ID NO: 5813 - RNA, 21 nt, synthetic construct
  misc_feature 1..21: note = Synthetic
  source 1..21: mol_type = other RNA
cagcctcttttcatcctccaa

SEQ ID NO: 5814 - RNA, 21 nt, synthetic construct
  misc_feature 1..21: note = Synthetic
  source 1..21: mol_type = other RNA
cagccttgcaggccttcgtgt

SEQ ID NO: 5815 - RNA, 21 nt, synthetic construct
  misc_feature 1..21: note = Synthetic
  source 1..21: mol_type = other RNA
cagccttgctcgtctgagccg

SEQ ID NO: 5816 - RNA, 21 nt, synthetic construct
  misc_feature 1..21: note = Synthetic
  source 1..21: mol_type = other RNA
cagcgaaactcgtcctgggag

SEQ ID NO: 5817 - RNA, 21 nt, synthetic construct
  misc_feature 1..21: note = Synthetic
  source 1..21: mol_type = other RNA
cagcgagtagatgtccacacc

SEQ ID NO: 5818 - RNA, 21 nt, synthetic construct
  misc_feature 1..21: note = Synthetic
  source 1..21: mol_type = other RNA
cagcgcaatttccagccccag

SEQ ID NO: 5819 - RNA, 21 nt, synthetic construct
  misc_feature 1..21: note = Synthetic
  source 1..21: mol_type = other RNA
cagcgcagttttcctcgtcag

SEQ ID NO: 5820 - RNA, 21 nt, synthetic construct
  misc_feature 1..21: note = Synthetic
  source 1..21: mol_type = other RNA
cagcgccagctggagtggatg

SEQ ID NO: 5821 - RNA, 21 nt, synthetic construct
  misc_feature 1..21: note = Synthetic
  source 1..21: mol_type = other RNA
cagcgctgccatcgcagaccc

SEQ ID NO: 5822 - RNA, 21 nt, synthetic construct
  misc_feature 1..21: note = Synthetic
  source 1..21: mol_type = other RNA
cagcgctgcggccactcatcc

SEQ ID NO: 5823 - RNA, 21 nt, synthetic construct
  misc_feature 1..21: note = Synthetic
  source 1..21: mol_type = other RNA
cagcggaaaccggggacttcg

SEQ ID NO: 5824 - RNA, 21 nt, synthetic construct
  misc_feature 1..21: note = Synthetic
  source 1..21: mol_type = other RNA
cagcggttgacacggccccca

SEQ ID NO: 5825 - RNA, 21 nt, synthetic construct
  misc_feature 1..21: note = Synthetic
  source 1..21: mol_type = other RNA
cagcgtcatcttcctgacctc

SEQ ID NO: 5826 - RNA, 21 nt, synthetic construct
  misc_feature 1..21: note = Synthetic
  source 1..21: mol_type = other RNA
cagctcagcctcccaaagtgc

SEQ ID NO: 5827 - RNA, 21 nt, synthetic construct
  misc_feature 1..21: note = Synthetic
  source 1..21: mol_type = other RNA
cagctccgtggcgatggggag

SEQ ID NO: 5828 - RNA, 21 nt, synthetic construct
  misc_feature 1..21: note = Synthetic
  source 1..21: mol_type = other RNA
cagctcctcatgtccctggcc

SEQ ID NO: 5829 - RNA, 21 nt, synthetic construct
  misc_feature 1..21: note = Synthetic
  source 1..21: mol_type = other RNA
cagctgaagtccccggatttg

SEQ ID NO: 5830 - RNA, 21 nt, synthetic construct
  misc_feature 1..21: note = Synthetic
  source 1..21: mol_type = other RNA
cagctgatttttaactttttg

SEQ ID NO: 5831 - RNA, 21 nt, synthetic construct
  misc_feature 1..21: note = Synthetic
  source 1..21: mol_type = other RNA
cagctgcccccgagaccagag

SEQ ID NO: 5832 - RNA, 21 nt, synthetic construct
  misc_feature 1..21: note = Synthetic
  source 1..21: mol_type = other RNA
cagctggaagccgtcggggca

SEQ ID NO: 5833 - RNA, 21 nt, synthetic construct
  misc_feature 1..21: note = Synthetic
  source 1..21: mol_type = other RNA
cagctggaagccttcctcaca

SEQ ID NO: 5834 - RNA, 21 nt, synthetic construct
  misc_feature 1..21: note = Synthetic
  source 1..21: mol_type = other RNA
cagctggagtggatgcactcg

SEQ ID NO: 5835 - RNA, 21 nt, synthetic construct
  misc_feature 1..21: note = Synthetic
  source 1..21: mol_type = other RNA
cagctgggggatgcaggtgga

SEQ ID NO: 5836 - RNA, 21 nt, synthetic construct
  misc_feature 1..21: note = Synthetic
  source 1..21: mol_type = other RNA
caggaaccgcggaggaacgcc

SEQ ID NO: 5837 - RNA, 21 nt, synthetic construct
  misc_feature 1..21: note = Synthetic
  source 1..21: mol_type = other RNA
caggaagggttctgggcaggg

SEQ ID NO: 5838 - RNA, 21 nt, synthetic construct
  misc_feature 1..21: note = Synthetic
  source 1..21: mol_type = other RNA
caggacaaggtggggacggag

SEQ ID NO: 5839 - RNA, 21 nt, synthetic construct
  misc_feature 1..21: note = Synthetic
  source 1..21: mol_type = other RNA
caggacagagtcggtccagta

SEQ ID NO: 5840 - RNA, 21 nt, synthetic construct
  misc_feature 1..21: note = Synthetic
  source 1..21: mol_type = other RNA
caggacagccttgctcgtctg

SEQ ID NO: 5841 - RNA, 21 nt, synthetic construct
  misc_feature 1..21: note = Synthetic
  source 1..21: mol_type = other RNA
caggaggcctcgtctgagccg

SEQ ID NO: 5842 - RNA, 21 nt, synthetic construct
  misc_feature 1..21: note = Synthetic
  source 1..21: mol_type = other RNA
caggagggcccaggataacgg

SEQ ID NO: 5843 - RNA, 21 nt, synthetic construct
  misc_feature 1..21: note = Synthetic
  source 1..21: mol_type = other RNA
caggataacggagggcgactc

SEQ ID NO: 5844 - RNA, 21 nt, synthetic construct
  misc_feature 1..21: note = Synthetic
  source 1..21: mol_type = other RNA
caggatccaccacgatggccc

SEQ ID NO: 5845 - RNA, 21 nt, synthetic construct
  misc_feature 1..21: note = Synthetic
  source 1..21: mol_type = other RNA
caggatggtctcgatctcctg

SEQ ID NO: 5846 - RNA, 21 nt, synthetic construct
  misc_feature 1..21: note = Synthetic
  source 1..21: mol_type = other RNA
caggcaaaggaagacgaggag

SEQ ID NO: 5847 - RNA, 21 nt, synthetic construct
  misc_feature 1..21: note = Synthetic
  source 1..21: mol_type = other RNA
caggcaatgctttggtcttct

SEQ ID NO: 5848 - RNA, 21 nt, synthetic construct
  misc_feature 1..21: note = Synthetic
  source 1..21: mol_type = other RNA
caggcacgtgccaccgtaccc

SEQ ID NO: 5849 - RNA, 21 nt, synthetic construct
  misc_feature 1..21: note = Synthetic
  source 1..21: mol_type = other RNA
caggcactcgtagccgatctt

SEQ ID NO: 5850 - RNA, 21 nt, synthetic construct
  misc_feature 1..21: note = Synthetic
  source 1..21: mol_type = other RNA
caggcacttaataaatattaa

SEQ ID NO: 5851 - RNA, 21 nt, synthetic construct
  misc_feature 1..21: note = Synthetic
  source 1..21: mol_type = other RNA
caggcagatgttcacgccacg

SEQ ID NO: 5852 - RNA, 21 nt, synthetic construct
  misc_feature 1..21: note = Synthetic
  source 1..21: mol_type = other RNA
caggcagccgggaggtgtcgg

SEQ ID NO: 5853 - RNA, 21 nt, synthetic construct
  misc_feature 1..21: note = Synthetic
  source 1..21: mol_type = other RNA
caggcagtgtcccgacccgga

SEQ ID NO: 5854 - RNA, 21 nt, synthetic construct
  misc_feature 1..21: note = Synthetic
  source 1..21: mol_type = other RNA
caggccacgtgtcctcacggc

SEQ ID NO: 5855 - RNA, 21 nt, synthetic construct
  misc_feature 1..21: note = Synthetic
  source 1..21: mol_type = other RNA
caggccagactgcggactgca

SEQ ID NO: 5856 - RNA, 21 nt, synthetic construct
  misc_feature 1..21: note = Synthetic
  source 1..21: mol_type = other RNA
caggcccacagctgggggatg

SEQ ID NO: 5857 - RNA, 21 nt, synthetic construct
  misc_feature 1..21: note = Synthetic
  source 1..21: mol_type = other RNA
caggccccctttcttgatctt

SEQ ID NO: 5858 - RNA, 21 nt, synthetic construct
  misc_feature 1..21: note = Synthetic
  source 1..21: mol_type = other RNA
caggcctggtctccaactcct

SEQ ID NO: 5859 - RNA, 21 nt, synthetic construct
  misc_feature 1..21: note = Synthetic
  source 1..21: mol_type = other RNA
caggccttcgtgtgggggtcc

SEQ ID NO: 5860 - RNA, 21 nt, synthetic construct
  misc_feature 1..21: note = Synthetic
  source 1..21: mol_type = other RNA
caggcgatcctcctgcctcag

SEQ ID NO: 5861 - RNA, 21 nt, synthetic construct
  misc_feature 1..21: note = Synthetic
  source 1..21: mol_type = other RNA
caggcgcaggtaaacttgggc

SEQ ID NO: 5862 - RNA, 21 nt, synthetic construct
  misc_feature 1..21: note = Synthetic
  source 1..21: mol_type = other RNA
caggcgtgagccactgcgccc

SEQ ID NO: 5863 - RNA, 21 nt, synthetic construct
  misc_feature 1..21: note = Synthetic
  source 1..21: mol_type = other RNA
caggcgtgaggcacctgtgtc

SEQ ID NO: 5864 - RNA, 21 nt, synthetic construct
  misc_feature 1..21: note = Synthetic
  source 1..21: mol_type = other RNA
caggctacaaaaaccttctat

SEQ ID NO: 5865 - RNA, 21 nt, synthetic construct
  misc_feature 1..21: note = Synthetic
  source 1..21: mol_type = other RNA
caggctctgcctctgggaagt

SEQ ID NO: 5866 - RNA, 21 nt, synthetic construct
  misc_feature 1..21: note = Synthetic
  source 1..21: mol_type = other RNA
caggctggaaagcagtggcat

SEQ ID NO: 5867 - RNA, 21 nt, synthetic construct
  misc_feature 1..21: note = Synthetic
  source 1..21: mol_type = other RNA
caggctggagtgcagtggctc

SEQ ID NO: 5868 - RNA, 21 nt, synthetic construct
  misc_feature 1..21: note = Synthetic
  source 1..21: mol_type = other RNA
caggctggtgtcctgacagcc

SEQ ID NO: 5869 - RNA, 21 nt, synthetic construct
  misc_feature 1..21: note = Synthetic
  source 1..21: mol_type = other RNA
cagggacgcatttacgtgctc

SEQ ID NO: 5870 - RNA, 21 nt, synthetic construct
  misc_feature 1..21: note = Synthetic
  source 1..21: mol_type = other RNA
cagggacgggactccaggcag

SEQ ID NO: 5871 - RNA, 21 nt, synthetic construct
  misc_feature 1..21: note = Synthetic
  source 1..21: mol_type = other RNA
cagggaggcacagatactggc

SEQ ID NO: 5872 - RNA, 21 nt, synthetic construct
  misc_feature 1..21: note = Synthetic
  source 1..21: mol_type = other RNA
cagggcaaaggctaacctggc

SEQ ID NO: 5873 - RNA, 21 nt, synthetic construct
  misc_feature 1..21: note = Synthetic
  source 1..21: mol_type = other RNA
cagggccagggggtcccgttg

SEQ ID NO: 5874 - RNA, 21 nt, synthetic construct
  misc_feature 1..21: note = Synthetic
  source 1..21: mol_type = other RNA
cagggccccatgctcgcagcc

SEQ ID NO: 5875 - RNA, 21 nt, synthetic construct
  misc_feature 1..21: note = Synthetic
  source 1..21: mol_type = other RNA
cagggccccgagaatagtcac

SEQ ID NO: 5876 - RNA, 21 nt, synthetic construct
  misc_feature 1..21: note = Synthetic
  source 1..21: mol_type = other RNA
cagggcgacaggtggccacag

SEQ ID NO: 5877 - RNA, 21 nt, synthetic construct
  misc_feature 1..21: note = Synthetic
  source 1..21: mol_type = other RNA
caggggctactgtccccttgg

SEQ ID NO: 5878 - RNA, 21 nt, synthetic construct
  misc_feature 1..21: note = Synthetic
  source 1..21: mol_type = other RNA
cagggggtcccgttggtgcca

SEQ ID NO: 5879 - RNA, 21 nt, synthetic construct
  misc_feature 1..21: note = Synthetic
  source 1..21: mol_type = other RNA
caggggtggccccaggcagcc

SEQ ID NO: 5880 - RNA, 21 nt, synthetic construct
  misc_feature 1..21: note = Synthetic
  source 1..21: mol_type = other RNA
cagggtgatgcattcgccgct

SEQ ID NO: 5881 - RNA, 21 nt, synthetic construct
  misc_feature 1..21: note = Synthetic
  source 1..21: mol_type = other RNA
cagggtggtcctctcacacca

SEQ ID NO: 5882 - RNA, 21 nt, synthetic construct
  misc_feature 1..21: note = Synthetic
  source 1..21: mol_type = other RNA
cagggtttgcaaaaataaata

SEQ ID NO: 5883 - RNA, 21 nt, synthetic construct
  misc_feature 1..21: note = Synthetic
  source 1..21: mol_type = other RNA
caggtaaacttgggcgagtgg

SEQ ID NO: 5884 - RNA, 21 nt, synthetic construct
  misc_feature 1..21: note = Synthetic
  source 1..21: mol_type = other RNA
caggtcagaccagtagattct

SEQ ID NO: 5885 - RNA, 21 nt, synthetic construct
  misc_feature 1..21: note = Synthetic
  source 1..21: mol_type = other RNA
caggtcgggtggttgtgtgct

SEQ ID NO: 5886 - RNA, 21 nt, synthetic construct
  misc_feature 1..21: note = Synthetic
  source 1..21: mol_type = other RNA
caggtgacagacaagcacgtc

SEQ ID NO: 5887 - RNA, 21 nt, synthetic construct
  misc_feature 1..21: note = Synthetic
  source 1..21: mol_type = other RNA
caggtgagcaccgggcaggag

SEQ ID NO: 5888 - RNA, 21 nt, synthetic construct
  misc_feature 1..21: note = Synthetic
  source 1..21: mol_type = other RNA
caggtgcccgccaccacgccc

SEQ ID NO: 5889 - RNA, 21 nt, synthetic construct
  misc_feature 1..21: note = Synthetic
  source 1..21: mol_type = other RNA
caggtggagctgttgcactgg

SEQ ID NO: 5890 - RNA, 21 nt, synthetic construct
  misc_feature 1..21: note = Synthetic
  source 1..21: mol_type = other RNA
caggtggccacagcgcagttt

SEQ ID NO: 5891 - RNA, 21 nt, synthetic construct
  misc_feature 1..21: note = Synthetic
  source 1..21: mol_type = other RNA
caggtggccacaggacagcct

SEQ ID NO: 5892 - RNA, 21 nt, synthetic construct
  misc_feature 1..21: note = Synthetic
  source 1..21: mol_type = other RNA
caggtgtcgggatcctgacac

SEQ ID NO: 5893 - RNA, 21 nt, synthetic construct
  misc_feature 1..21: note = Synthetic
  source 1..21: mol_type = other RNA
caggttcacgcagagctggct

SEQ ID NO: 5894 - RNA, 21 nt, synthetic construct
  misc_feature 1..21: note = Synthetic
  source 1..21: mol_type = other RNA
caggttggggatgaggctggt

SEQ ID NO: 5895 - RNA, 21 nt, synthetic construct
  misc_feature 1..21: note = Synthetic
  source 1..21: mol_type = other RNA
cagtaacacggcgatttcaga

SEQ ID NO: 5896 - RNA, 21 nt, synthetic construct
  misc_feature 1..21: note = Synthetic
  source 1..21: mol_type = other RNA
cagtaagacattcaggctaca

SEQ ID NO: 5897 - RNA, 21 nt, synthetic construct
  misc_feature 1..21: note = Synthetic
  source 1..21: mol_type = other RNA
cagtacatgaagccatgaaca

SEQ ID NO: 5898 - RNA, 21 nt, synthetic construct
  misc_feature 1..21: note = Synthetic
  source 1..21: mol_type = other RNA
cagtagaggcggccactgagg

SEQ ID NO: 5899 - RNA, 21 nt, synthetic construct
  misc_feature 1..21: note = Synthetic
  source 1..21: mol_type = other RNA
cagtagatgttgctgtggatc

SEQ ID NO: 5900 - RNA, 21 nt, synthetic construct
  misc_feature 1..21: note = Synthetic
  source 1..21: mol_type = other RNA
cagtagattctattgctggcc

SEQ ID NO: 5901 - RNA, 21 nt, synthetic construct
  misc_feature 1..21: note = Synthetic
  source 1..21: mol_type = other RNA
cagtaggttttcagccaacaa

SEQ ID NO: 5902 - RNA, 21 nt, synthetic construct
  misc_feature 1..21: note = Synthetic
  source 1..21: mol_type = other RNA
cagtcaccagcgagtagatgt

SEQ ID NO: 5903 - RNA, 21 nt, synthetic construct
  misc_feature 1..21: note = Synthetic
  source 1..21: mol_type = other RNA
cagtcagtccagtacatgaag

SEQ ID NO: 5904 - RNA, 21 nt, synthetic construct
  misc_feature 1..21: note = Synthetic
  source 1..21: mol_type = other RNA
cagtcatattcccggtcacac

SEQ ID NO: 5905 - RNA, 21 nt, synthetic construct
  misc_feature 1..21: note = Synthetic
  source 1..21: mol_type = other RNA
cagtccacagccagcccgtcg

SEQ ID NO: 5906 - RNA, 21 nt, synthetic construct
  misc_feature 1..21: note = Synthetic
  source 1..21: mol_type = other RNA
cagtccacttggccatcgcac

SEQ ID NO: 5907 - RNA, 21 nt, synthetic construct
  misc_feature 1..21: note = Synthetic
  source 1..21: mol_type = other RNA
cagtccagtacatgaagccat

SEQ ID NO: 5908 - RNA, 21 nt, synthetic construct
  misc_feature 1..21: note = Synthetic
  source 1..21: mol_type = other RNA
cagtccagttcgtgcaaataa

SEQ ID NO: 5909 - RNA, 21 nt, synthetic construct
  misc_feature 1..21: note = Synthetic
  source 1..21: mol_type = other RNA
cagtccccgccgcggcgagga

SEQ ID NO: 5910 - RNA, 21 nt, synthetic construct
  misc_feature 1..21: note = Synthetic
  source 1..21: mol_type = other RNA
cagtcccggcagtctctagcc

SEQ ID NO: 5911 - RNA, 21 nt, synthetic construct
  misc_feature 1..21: note = Synthetic
  source 1..21: mol_type = other RNA
cagtcccggtctgagtcacag

SEQ ID NO: 5912 - RNA, 21 nt, synthetic construct
  misc_feature 1..21: note = Synthetic
  source 1..21: mol_type = other RNA
cagtcggggccaccatcacag

SEQ ID NO: 5913 - RNA, 21 nt, synthetic construct
  misc_feature 1..21: note = Synthetic
  source 1..21: mol_type = other RNA
cagtcggggtcgttgtcgcag

SEQ ID NO: 5914 - RNA, 21 nt, synthetic construct
  misc_feature 1..21: note = Synthetic
  source 1..21: mol_type = other RNA
cagtctctagccatgttgcag

SEQ ID NO: 5915 - RNA, 21 nt, synthetic construct
  misc_feature 1..21: note = Synthetic
  source 1..21: mol_type = other RNA
cagtgactcaggctctgcctc

SEQ ID NO: 5916 - RNA, 21 nt, synthetic construct
  misc_feature 1..21: note = Synthetic
  source 1..21: mol_type = other RNA
cagtgcaaaataataacacaa

SEQ ID NO: 5917 - RNA, 21 nt, synthetic construct
  misc_feature 1..21: note = Synthetic
  source 1..21: mol_type = other RNA
cagtgcaacagtaacacggcg

SEQ ID NO: 5918 - RNA, 21 nt, synthetic construct
  misc_feature 1..21: note = Synthetic
  source 1..21: mol_type = other RNA
cagtgcccaggacagagtcgg

SEQ ID NO: 5919 - RNA, 21 nt, synthetic construct
  misc_feature 1..21: note = Synthetic
  source 1..21: mol_type = other RNA
cagtggaactcgaaggccgag

SEQ ID NO: 5920 - RNA, 21 nt, synthetic construct
  misc_feature 1..21: note = Synthetic
  source 1..21: mol_type = other RNA
cagtggcataatcatagctca

SEQ ID NO: 5921 - RNA, 21 nt, synthetic construct
  misc_feature 1..21: note = Synthetic
  source 1..21: mol_type = other RNA
cagtggcgcaatctcggctca

SEQ ID NO: 5922 - RNA, 21 nt, synthetic construct
  misc_feature 1..21: note = Synthetic
  source 1..21: mol_type = other RNA
cagtggctcgatcatggctca

SEQ ID NO: 5923 - RNA, 21 nt, synthetic construct
  misc_feature 1..21: note = Synthetic
  source 1..21: mol_type = other RNA
cagtggtttaaaaagtgacac

SEQ ID NO: 5924 - RNA, 21 nt, synthetic construct
  misc_feature 1..21: note = Synthetic
  source 1..21: mol_type = other RNA
cagtgtacaactctgaactga

SEQ ID NO: 5925 - RNA, 21 nt, synthetic construct
  misc_feature 1..21: note = Synthetic
  source 1..21: mol_type = other RNA
cagtgtcccgacccggatcac

SEQ ID NO: 5926 - RNA, 21 nt, synthetic construct
  misc_feature 1..21: note = Synthetic
  source 1..21: mol_type = other RNA
cagtgttttgtccctggggac

SEQ ID NO: 5927 - RNA, 21 nt, synthetic construct
  misc_feature 1..21: note = Synthetic
  source 1..21: mol_type = other RNA
cagttcactcctcttggctgg

SEQ ID NO: 5928 - RNA, 21 nt, synthetic construct
  misc_feature 1..21: note = Synthetic
  source 1..21: mol_type = other RNA
cagttcgtgcaaataatcttt

SEQ ID NO: 5929 - RNA, 21 nt, synthetic construct
  misc_feature 1..21: note = Synthetic
  source 1..21: mol_type = other RNA
cagttctcgatattcacgatc

SEQ ID NO: 5930 - RNA, 21 nt, synthetic construct
  misc_feature 1..21: note = Synthetic
  source 1..21: mol_type = other RNA
cagttcttccatagaaggaag

SEQ ID NO: 5931 - RNA, 21 nt, synthetic construct
  misc_feature 1..21: note = Synthetic
  source 1..21: mol_type = other RNA
cagtttcaaccaatatacaaa

SEQ ID NO: 5932 - RNA, 21 nt, synthetic construct
  misc_feature 1..21: note = Synthetic
  source 1..21: mol_type = other RNA
cagtttccatcagagcactgg

SEQ ID NO: 5933 - RNA, 21 nt, synthetic construct
  misc_feature 1..21: note = Synthetic
  source 1..21: mol_type = other RNA
cagttttcctcgtcagatttg

SEQ ID NO: 5934 - RNA, 21 nt, synthetic construct
  misc_feature 1..21: note = Synthetic
  source 1..21: mol_type = other RNA
cataaagaagaggcatttcag

SEQ ID NO: 5935 - RNA, 21 nt, synthetic construct
  misc_feature 1..21: note = Synthetic
  source 1..21: mol_type = other RNA
cataaagacgacaatggcagt

SEQ ID NO: 5936 - RNA, 21 nt, synthetic construct
  misc_feature 1..21: note = Synthetic
  source 1..21: mol_type = other RNA
cataacaaaaaatccccacta

SEQ ID NO: 5937 - RNA, 21 nt, synthetic construct
  misc_feature 1..21: note = Synthetic
  source 1..21: mol_type = other RNA
cataatcatagctcacgacag

SEQ ID NO: 5938 - RNA, 21 nt, synthetic construct
  misc_feature 1..21: note = Synthetic
  source 1..21: mol_type = other RNA
catacaacggggacatcattc

SEQ ID NO: 5939 - RNA, 21 nt, synthetic construct
  misc_feature 1..21: note = Synthetic
  source 1..21: mol_type = other RNA
catacatacaacggggacatc

SEQ ID NO: 5940 - RNA, 21 nt, synthetic construct
  misc_feature 1..21: note = Synthetic
  source 1..21: mol_type = other RNA
catacccatcaacgacaagat

SEQ ID NO: 5941 - RNA, 21 nt, synthetic construct
  misc_feature 1..21: note = Synthetic
  source 1..21: mol_type = other RNA
catagaagaggtaaacacgtt

SEQ ID NO: 5942 - RNA, 21 nt, synthetic construct
  misc_feature 1..21: note = Synthetic
  source 1..21: mol_type = other RNA
catagaaggaagacccccagg

SEQ ID NO: 5943 - RNA, 21 nt, synthetic construct
  misc_feature 1..21: note = Synthetic
  source 1..21: mol_type = other RNA
catagaagtggaagcactagg

SEQ ID NO: 5944 - RNA, 21 nt, synthetic construct
  misc_feature 1..21: note = Synthetic
  source 1..21: mol_type = other RNA
catagctcacgacagcctcaa

SEQ ID NO: 5945 - RNA, 21 nt, synthetic construct
  misc_feature 1..21: note = Synthetic
  source 1..21: mol_type = other RNA
cataggaagagacgccgtggg

SEQ ID NO: 5946 - RNA, 21 nt, synthetic construct
  misc_feature 1..21: note = Synthetic
  source 1..21: mol_type = other RNA
catatcctctggggacagtag

SEQ ID NO: 5947 - RNA, 21 nt, synthetic construct
  misc_feature 1..21: note = Synthetic
  source 1..21: mol_type = other RNA
catattcccggtcacactgcc

SEQ ID NO: 5948 - RNA, 21 nt, synthetic construct
  misc_feature 1..21: note = Synthetic
  source 1..21: mol_type = other RNA
catcaacgacaagattgggga

SEQ ID NO: 5949 - RNA, 21 nt, synthetic construct
  misc_feature 1..21: note = Synthetic
  source 1..21: mol_type = other RNA
catcacagcgccagctggagt

SEQ ID NO: 5950 - RNA, 21 nt, synthetic construct
  misc_feature 1..21: note = Synthetic
  source 1..21: mol_type = other RNA
catcagagcactggaattcgt

SEQ ID NO: 5951 - RNA, 21 nt, synthetic construct
  misc_feature 1..21: note = Synthetic
  source 1..21: mol_type = other RNA
catcagagccatcctggcact

SEQ ID NO: 5952 - RNA, 21 nt, synthetic construct
  misc_feature 1..21: note = Synthetic
  source 1..21: mol_type = other RNA
catcagtgcaacagtaacacg

SEQ ID NO: 5953 - RNA, 21 nt, synthetic construct
  misc_feature 1..21: note = Synthetic
  source 1..21: mol_type = other RNA
catcattctcccaaaaagcgt

SEQ ID NO: 5954 - RNA, 21 nt, synthetic construct
  misc_feature 1..21: note = Synthetic
  source 1..21: mol_type = other RNA
catcatttggtgaatgagttt

SEQ ID NO: 5955 - RNA, 21 nt, synthetic construct
  misc_feature 1..21: note = Synthetic
  source 1..21: mol_type = other RNA
catcccaacacacacgacaga

SEQ ID NO: 5956 - RNA, 21 nt, synthetic construct
  misc_feature 1..21: note = Synthetic
  source 1..21: mol_type = other RNA
catcccctcccctttcatctt

SEQ ID NO: 5957 - RNA, 21 nt, synthetic construct
  misc_feature 1..21: note = Synthetic
  source 1..21: mol_type = other RNA
catccgagccatcttcgcagt

SEQ ID NO: 5958 - RNA, 21 nt, synthetic construct
  misc_feature 1..21: note = Synthetic
  source 1..21: mol_type = other RNA
catcctccaagatggtcttcc

SEQ ID NO: 5959 - RNA, 21 nt, synthetic construct
  misc_feature 1..21: note = Synthetic
  source 1..21: mol_type = other RNA
catcctccagactgaccatcg

SEQ ID NO: 5960 - RNA, 21 nt, synthetic construct
  misc_feature 1..21: note = Synthetic
  source 1..21: mol_type = other RNA
catcctccagactgaccatct

SEQ ID NO: 5961 - RNA, 21 nt, synthetic construct
  misc_feature 1..21: note = Synthetic
  source 1..21: mol_type = other RNA
catcctcccacctcagcctcg

SEQ ID NO: 5962 - RNA, 21 nt, synthetic construct
  misc_feature 1..21: note = Synthetic
  source 1..21: mol_type = other RNA
catcctctgtggtcttctgat

SEQ ID NO: 5963 - RNA, 21 nt, synthetic construct
  misc_feature 1..21: note = Synthetic
  source 1..21: mol_type = other RNA
catcctggcactcagcgctgc

SEQ ID NO: 5964 - RNA, 21 nt, synthetic construct
  misc_feature 1..21: note = Synthetic
  source 1..21: mol_type = other RNA
catcctggtccccccgggcct

SEQ ID NO: 5965 - RNA, 21 nt, synthetic construct
  misc_feature 1..21: note = Synthetic
  source 1..21: mol_type = other RNA
catcgaggggtagctgtagcc

SEQ ID NO: 5966 - RNA, 21 nt, synthetic construct
  misc_feature 1..21: note = Synthetic
  source 1..21: mol_type = other RNA
catcgatatcgcactctttga

SEQ ID NO: 5967 - RNA, 21 nt, synthetic construct
  misc_feature 1..21: note = Synthetic
  source 1..21: mol_type = other RNA
catcgatatcttcgcatcttc

SEQ ID NO: 5968 - RNA, 21 nt, synthetic construct
  misc_feature 1..21: note = Synthetic
  source 1..21: mol_type = other RNA
catcgatgcttgagatggagt

SEQ ID NO: 5969 - RNA, 21 nt, synthetic construct
  misc_feature 1..21: note = Synthetic
  source 1..21: mol_type = other RNA
catcgcacctccagaactgag

SEQ ID NO: 5970 - RNA, 21 nt, synthetic construct
  misc_feature 1..21: note = Synthetic
  source 1..21: mol_type = other RNA
catcgcagacccacttgtagg

SEQ ID NO: 5971 - RNA, 21 nt, synthetic construct
  misc_feature 1..21: note = Synthetic
  source 1..21: mol_type = other RNA
catcgctcatgtccttgcagt

SEQ ID NO: 5972 - RNA, 21 nt, synthetic construct
  misc_feature 1..21: note = Synthetic
  source 1..21: mol_type = other RNA
catcggaacctgtgaggcggt

SEQ ID NO: 5973 - RNA, 21 nt, synthetic construct
  misc_feature 1..21: note = Synthetic
  source 1..21: mol_type = other RNA
catcgtggcagcgaaactcgt

SEQ ID NO: 5974 - RNA, 21 nt, synthetic construct
  misc_feature 1..21: note = Synthetic
  source 1..21: mol_type = other RNA
catctcccagaagccactcat

SEQ ID NO: 5975 - RNA, 21 nt, synthetic construct
  misc_feature 1..21: note = Synthetic
  source 1..21: mol_type = other RNA
catctgaccagtcccggcagt

SEQ ID NO: 5976 - RNA, 21 nt, synthetic construct
  misc_feature 1..21: note = Synthetic
  source 1..21: mol_type = other RNA
catctgctgttgtgtgttgaa

SEQ ID NO: 5977 - RNA, 21 nt, synthetic construct
  misc_feature 1..21: note = Synthetic
  source 1..21: mol_type = other RNA
catctgtcgcccacgtggctg

SEQ ID NO: 5978 - RNA, 21 nt, synthetic construct
  misc_feature 1..21: note = Synthetic
  source 1..21: mol_type = other RNA
catctgtcgcccactgcagtc

SEQ ID NO: 5979 - RNA, 21 nt, synthetic construct
  misc_feature 1..21: note = Synthetic
  source 1..21: mol_type = other RNA
catctgtctcgaggggtagct

SEQ ID NO: 5980 - RNA, 21 nt, synthetic construct
  misc_feature 1..21: note = Synthetic
  source 1..21: mol_type = other RNA
catctgttgcccaggctggag

SEQ ID NO: 5981 - RNA, 21 nt, synthetic construct
  misc_feature 1..21: note = Synthetic
  source 1..21: mol_type = other RNA
catcttcacgcgggagtctga

SEQ ID NO: 5982 - RNA, 21 nt, synthetic construct
  misc_feature 1..21: note = Synthetic
  source 1..21: mol_type = other RNA
catcttccatgtttgaggatt

SEQ ID NO: 5983 - RNA, 21 nt, synthetic construct
  misc_feature 1..21: note = Synthetic
  source 1..21: mol_type = other RNA
catcttcctgacctcgtgccg

SEQ ID NO: 5984 - RNA, 21 nt, synthetic construct
  misc_feature 1..21: note = Synthetic
  source 1..21: mol_type = other RNA
catcttcgcagtcggggtcgt

SEQ ID NO: 5985 - RNA, 21 nt, synthetic construct
  misc_feature 1..21: note = Synthetic
  source 1..21: mol_type = other RNA
catcttcgctgggccaccagc

SEQ ID NO: 5986 - RNA, 21 nt, synthetic construct
  misc_feature 1..21: note = Synthetic
  source 1..21: mol_type = other RNA
catgaacaggatccaccacga

SEQ ID NO: 5987 - RNA, 21 nt, synthetic construct
  misc_feature 1..21: note = Synthetic
  source 1..21: mol_type = other RNA
catgaagccatgaacaggatc

SEQ ID NO: 5988 - RNA, 21 nt, synthetic construct
  misc_feature 1..21: note = Synthetic
  source 1..21: mol_type = other RNA
catgaatccctttcctggctt

SEQ ID NO: 5989 - RNA, 21 nt, synthetic construct
  misc_feature 1..21: note = Synthetic
  source 1..21: mol_type = other RNA
catgatccacccgcctcggcc

SEQ ID NO: 5990 - RNA, 21 nt, synthetic construct
  misc_feature 1..21: note = Synthetic
  source 1..21: mol_type = other RNA
catgattcgggggtgacaggg

SEQ ID NO: 5991 - RNA, 21 nt, synthetic construct
  misc_feature 1..21: note = Synthetic
  source 1..21: mol_type = other RNA
catgcatggtttttttttgtt

SEQ ID NO: 5992 - RNA, 21 nt, synthetic construct
  misc_feature 1..21: note = Synthetic
  source 1..21: mol_type = other RNA
catgccgtccgggcaggcgca

SEQ ID NO: 5993 - RNA, 21 nt, synthetic construct
  misc_feature 1..21: note = Synthetic
  source 1..21: mol_type = other RNA
catgcctggccagaggccatg

SEQ ID NO: 5994 - RNA, 21 nt, synthetic construct
  misc_feature 1..21: note = Synthetic
  source 1..21: mol_type = other RNA
catgctcgcagcctctgccag

SEQ ID NO: 5995 - RNA, 21 nt, synthetic construct
  misc_feature 1..21: note = Synthetic
  source 1..21: mol_type = other RNA
catggatgcagtttccatcag

SEQ ID NO: 5996 - RNA, 21 nt, synthetic construct
  misc_feature 1..21: note = Synthetic
  source 1..21: mol_type = other RNA
catggctcactgcaacctcca

SEQ ID NO: 5997 - RNA, 21 nt, synthetic construct
  misc_feature 1..21: note = Synthetic
  source 1..21: mol_type = other RNA
catgggcactgtccgaagcct

SEQ ID NO: 5998 - RNA, 21 nt, synthetic construct
  misc_feature 1..21: note = Synthetic
  source 1..21: mol_type = other RNA
catgggctgctgatgcaccat

SEQ ID NO: 5999 - RNA, 21 nt, synthetic construct
  misc_feature 1..21: note = Synthetic
  source 1..21: mol_type = other RNA
catggtttttttttgtttttt

SEQ ID NO: 6000 - RNA, 21 nt, synthetic construct
  misc_feature 1..21: note = Synthetic
  source 1..21: mol_type = other RNA
catgtccctggccagcagcat

SEQ ID NO: 6001 - RNA, 21 nt, synthetic construct
  misc_feature 1..21: note = Synthetic
  source 1..21: mol_type = other RNA
catgtccttgcagtcatattc

SEQ ID NO: 6002 - RNA, 21 nt, synthetic construct
  misc_feature 1..21: note = Synthetic
  source 1..21: mol_type = other RNA
catgttgcagactttgtccag

SEQ ID NO: 6003 - RNA, 21 nt, synthetic construct
  misc_feature 1..21: note = Synthetic
  source 1..21: mol_type = other RNA
catgtttgaggattgtgtcac

SEQ ID NO: 6004 - RNA, 21 nt, synthetic construct
  misc_feature 1..21: note = Synthetic
  source 1..21: mol_type = other RNA
catgttttaaacacataccca

SEQ ID NO: 6005 - RNA, 21 nt, synthetic construct
  misc_feature 1..21: note = Synthetic
  source 1..21: mol_type = other RNA
cattaacgcagccaacttcat

SEQ ID NO: 6006 - RNA, 21 nt, synthetic construct
  misc_feature 1..21: note = Synthetic
  source 1..21: mol_type = other RNA
cattcaggccccctttcttga

SEQ ID NO: 6007 - RNA, 21 nt, synthetic construct
  misc_feature 1..21: note = Synthetic
  source 1..21: mol_type = other RNA
cattcaggctacaaaaacctt

SEQ ID NO: 6008 - RNA, 21 nt, synthetic construct
  misc_feature 1..21: note = Synthetic
  source 1..21: mol_type = other RNA
cattcattgacacgggctttc

SEQ ID NO: 6009 - RNA, 21 nt, synthetic construct
  misc_feature 1..21: note = Synthetic
  source 1..21: mol_type = other RNA
cattcgccgctgtgacacttg

SEQ ID NO: 6010 - RNA, 21 nt, synthetic construct
  misc_feature 1..21: note = Synthetic
  source 1..21: mol_type = other RNA
cattcgttggtcccgcactct

SEQ ID NO: 6011 - RNA, 21 nt, synthetic construct
  misc_feature 1..21: note = Synthetic
  source 1..21: mol_type = other RNA
cattctcccaaaaagcgttgc

SEQ ID NO: 6012 - RNA, 21 nt, synthetic construct
  misc_feature 1..21: note = Synthetic
  source 1..21: mol_type = other RNA
cattctcctgcctcagcctcc

SEQ ID NO: 6013 - RNA, 21 nt, synthetic construct
  misc_feature 1..21: note = Synthetic
  source 1..21: mol_type = other RNA
cattctctgggacaggtcaga

SEQ ID NO: 6014 - RNA, 21 nt, synthetic construct
  misc_feature 1..21: note = Synthetic
  source 1..21: mol_type = other RNA
cattgacacgggctttccctg

SEQ ID NO: 6015 - RNA, 21 nt, synthetic construct
  misc_feature 1..21: note = Synthetic
  source 1..21: mol_type = other RNA
cattgcagacgtgggaacagc

SEQ ID NO: 6016 - RNA, 21 nt, synthetic construct
  misc_feature 1..21: note = Synthetic
  source 1..21: mol_type = other RNA
cattgcatgggcactgtccga

SEQ ID NO: 6017 - RNA, 21 nt, synthetic construct
  misc_feature 1..21: note = Synthetic
  source 1..21: mol_type = other RNA
cattgctcagggtggtcctct

SEQ ID NO: 6018 - RNA, 21 nt, synthetic construct
  misc_feature 1..21: note = Synthetic
  source 1..21: mol_type = other RNA
cattgggccactgaatgtttt

SEQ ID NO: 6019 - RNA, 21 nt, synthetic construct
  misc_feature 1..21: note = Synthetic
  source 1..21: mol_type = other RNA
cattgtcactatctccaccgt

SEQ ID NO: 6020 - RNA, 21 nt, synthetic construct
  misc_feature 1..21: note = Synthetic
  source 1..21: mol_type = other RNA
catttaagaaatttaattgat

SEQ ID NO: 6021 - RNA, 21 nt, synthetic construct
  misc_feature 1..21: note = Synthetic
  source 1..21: mol_type = other RNA
catttacgtgctccgaaacca

SEQ ID NO: 6022 - RNA, 21 nt, synthetic construct
  misc_feature 1..21: note = Synthetic
  source 1..21: mol_type = other RNA
catttcagaggcaataacccc

SEQ ID NO: 6023 - RNA, 21 nt, synthetic construct
  misc_feature 1..21: note = Synthetic
  source 1..21: mol_type = other RNA
catttcccgtcttggcactgg

SEQ ID NO: 6024 - RNA, 21 nt, synthetic construct
  misc_feature 1..21: note = Synthetic
  source 1..21: mol_type = other RNA
catttccgacgccatgaatcc

SEQ ID NO: 6025 - RNA, 21 nt, synthetic construct
  misc_feature 1..21: note = Synthetic
  source 1..21: mol_type = other RNA
catttcctctgccagcaacgt

SEQ ID NO: 6026 - RNA, 21 nt, synthetic construct
  misc_feature 1..21: note = Synthetic
  source 1..21: mol_type = other RNA
catttgcatagaagtggaagc

SEQ ID NO: 6027 - RNA, 21 nt, synthetic construct
  misc_feature 1..21: note = Synthetic
  source 1..21: mol_type = other RNA
catttggtgaatgagtttggt

SEQ ID NO: 6028 - RNA, 21 nt, synthetic construct
  misc_feature 1..21: note = Synthetic
  source 1..21: mol_type = other RNA
cattttttaagagatggggtc

SEQ ID NO: 6029 - RNA, 21 nt, synthetic construct
  misc_feature 1..21: note = Synthetic
  source 1..21: mol_type = other RNA
ccaaaaagcgttgcacacagt

SEQ ID NO: 6030 - RNA, 21 nt, synthetic construct
  misc_feature 1..21: note = Synthetic
  source 1..21: mol_type = other RNA
ccaaaatactttgtcctcaaa

SEQ ID NO: 6031 - RNA, 21 nt, synthetic construct
  misc_feature 1..21: note = Synthetic
  source 1..21: mol_type = other RNA
ccaaaatcccaacccaagcca

SEQ ID NO: 6032 - RNA, 21 nt, synthetic construct
  misc_feature 1..21: note = Synthetic
  source 1..21: mol_type = other RNA
ccaaagtgctgggattacagg

SEQ ID NO: 6033 - RNA, 21 nt, synthetic construct
  misc_feature 1..21: note = Synthetic
  source 1..21: mol_type = other RNA
ccaaatgtacacagtgtacaa

SEQ ID NO: 6034 - RNA, 21 nt, synthetic construct
  misc_feature 1..21: note = Synthetic
  source 1..21: mol_type = other RNA
ccaaattcattttttaagaga

SEQ ID NO: 6035 - RNA, 21 nt, synthetic construct
  misc_feature 1..21: note = Synthetic
  source 1..21: mol_type = other RNA
ccaacaagttgacatcggaac

SEQ ID NO: 6036 - RNA, 21 nt, synthetic construct
  misc_feature 1..21: note = Synthetic
  source 1..21: mol_type = other RNA
ccaacacacacgacagaaaac

SEQ ID NO: 6037 - RNA, 21 nt, synthetic construct
  misc_feature 1..21: note = Synthetic
  source 1..21: mol_type = other RNA
ccaacccaagccattgcatgg

SEQ ID NO: 6038 - RNA, 21 nt, synthetic construct
  misc_feature 1..21: note = Synthetic
  source 1..21: mol_type = other RNA
ccaactcctgaactcaagtga

SEQ ID NO: 6039 - RNA, 21 nt, synthetic construct
  misc_feature 1..21: note = Synthetic
  source 1..21: mol_type = other RNA
ccaacttcatcgctcatgtcc

SEQ ID NO: 6040 - RNA, 21 nt, synthetic construct
  misc_feature 1..21: note = Synthetic
  source 1..21: mol_type = other RNA
ccaagatggtcttccggttgc

SEQ ID NO: 6041 - RNA, 21 nt, synthetic construct
  misc_feature 1..21: note = Synthetic
  source 1..21: mol_type = other RNA
ccaagcagtcccggtctgagt

SEQ ID NO: 6042 - RNA, 21 nt, synthetic construct
  misc_feature 1..21: note = Synthetic
  source 1..21: mol_type = other RNA
ccaagcattcgttggtcccgc

SEQ ID NO: 6043 - RNA, 21 nt, synthetic construct
  misc_feature 1..21: note = Synthetic
  source 1..21: mol_type = other RNA
ccaagccattgcatgggcact

SEQ ID NO: 6044 - RNA, 21 nt, synthetic construct
  misc_feature 1..21: note = Synthetic
  source 1..21: mol_type = other RNA
ccaaggagaaggggtgggcca

SEQ ID NO: 6045 - RNA, 21 nt, synthetic construct
  misc_feature 1..21: note = Synthetic
  source 1..21: mol_type = other RNA
ccaaggaggggcggggagatt

SEQ ID NO: 6046 - RNA, 21 nt, synthetic construct
  misc_feature 1..21: note = Synthetic
  source 1..21: mol_type = other RNA
ccaaggtaaccgggtgtctca

SEQ ID NO: 6047 - RNA, 21 nt, synthetic construct
  misc_feature 1..21: note = Synthetic
  source 1..21: mol_type = other RNA
ccaagtagctgggatcacagg

SEQ ID NO: 6048 - RNA, 21 nt, synthetic construct
  misc_feature 1..21: note = Synthetic
  source 1..21: mol_type = other RNA
ccaatatacaaagtgcaaaca

SEQ ID NO: 6049 - RNA, 21 nt, synthetic construct
  misc_feature 1..21: note = Synthetic
  source 1..21: mol_type = other RNA
ccaatcccttgtgacatcttc

SEQ ID NO: 6050 - RNA, 21 nt, synthetic construct
  misc_feature 1..21: note = Synthetic
  source 1..21: mol_type = other RNA
ccacaccattcaggccccctt

SEQ ID NO: 6051 - RNA, 21 nt, synthetic construct
  misc_feature 1..21: note = Synthetic
  source 1..21: mol_type = other RNA
ccacacctgggtgcaggccac

SEQ ID NO: 6052 - RNA, 21 nt, synthetic construct
  misc_feature 1..21: note = Synthetic
  source 1..21: mol_type = other RNA
ccacagagcacagcggaaacc

SEQ ID NO: 6053 - RNA, 21 nt, synthetic construct
  misc_feature 1..21: note = Synthetic
  source 1..21: mol_type = other RNA
ccacagccagcccgtcggggg

SEQ ID NO: 6054 - RNA, 21 nt, synthetic construct
  misc_feature 1..21: note = Synthetic
  source 1..21: mol_type = other RNA
ccacagccttgcaggccttcg

SEQ ID NO: 6055 - RNA, 21 nt, synthetic construct
  misc_feature 1..21: note = Synthetic
  source 1..21: mol_type = other RNA
ccacagcgcagttttcctcgt

SEQ ID NO: 6056 - RNA, 21 nt, synthetic construct
  misc_feature 1..21: note = Synthetic
  source 1..21: mol_type = other RNA
ccacagctgaagtccccggat

SEQ ID NO: 6057 - RNA, 21 nt, synthetic construct
  misc_feature 1..21: note = Synthetic
  source 1..21: mol_type = other RNA
ccacagctgggggatgcaggt

SEQ ID NO: 6058 - RNA, 21 nt, synthetic construct
  misc_feature 1..21: note = Synthetic
  source 1..21: mol_type = other RNA
ccacaggacagccttgctcgt

SEQ ID NO: 6059 - RNA, 21 nt, synthetic construct
  misc_feature 1..21: note = Synthetic
  source 1..21: mol_type = other RNA
ccacaggtgagcaccgggcag

SEQ ID NO: 6060 - RNA, 21 nt, synthetic construct
  misc_feature 1..21: note = Synthetic
  source 1..21: mol_type = other RNA
ccaccacgatggcccttggct

SEQ ID NO: 6061 - RNA, 21 nt, synthetic construct
  misc_feature 1..21: note = Synthetic
  source 1..21: mol_type = other RNA
ccaccacgcccggctaatttt

SEQ ID NO: 6062 - RNA, 21 nt, synthetic construct
  misc_feature 1..21: note = Synthetic
  source 1..21: mol_type = other RNA
ccaccacggattcagccagat

SEQ ID NO: 6063 - RNA, 21 nt, synthetic construct
  misc_feature 1..21: note = Synthetic
  source 1..21: mol_type = other RNA
ccaccagctggaagccgtcgg

SEQ ID NO: 6064 - RNA, 21 nt, synthetic construct
  misc_feature 1..21: note = Synthetic
  source 1..21: mol_type = other RNA
ccaccatcacagcgccagctg

SEQ ID NO: 6065 - RNA, 21 nt, synthetic construct
  misc_feature 1..21: note = Synthetic
  source 1..21: mol_type = other RNA
ccacccgcctcggcctcccaa

SEQ ID NO: 6066 - RNA, 21 nt, synthetic construct
  misc_feature 1..21: note = Synthetic
  source 1..21: mol_type = other RNA
ccaccctccaggttcacgcag

SEQ ID NO: 6067 - RNA, 21 nt, synthetic construct
  misc_feature 1..21: note = Synthetic
  source 1..21: mol_type = other RNA
ccaccgtacccagctgatttt

SEQ ID NO: 6068 - RNA, 21 nt, synthetic construct
  misc_feature 1..21: note = Synthetic
  source 1..21: mol_type = other RNA
ccaccgtggtgagcccagggg

SEQ ID NO: 6069 - RNA, 21 nt, synthetic construct
  misc_feature 1..21: note = Synthetic
  source 1..21: mol_type = other RNA
ccacctcagcctcgccatgcc

SEQ ID NO: 6070 - RNA, 21 nt, synthetic construct
  misc_feature 1..21: note = Synthetic
  source 1..21: mol_type = other RNA
ccacctccgtgtccagagcga

SEQ ID NO: 6071 - RNA, 21 nt, synthetic construct
  misc_feature 1..21: note = Synthetic
  source 1..21: mol_type = other RNA
ccacctcctgggctcaggcga

SEQ ID NO: 6072 - RNA, 21 nt, synthetic construct
  misc_feature 1..21: note = Synthetic
  source 1..21: mol_type = other RNA
ccacctcgaaagacactgggt

SEQ ID NO: 6073 - RNA, 21 nt, synthetic construct
  misc_feature 1..21: note = Synthetic
  source 1..21: mol_type = other RNA
ccacgatggcccttggcttgg

SEQ ID NO: 6074 - RNA, 21 nt, synthetic construct
  misc_feature 1..21: note = Synthetic
  source 1..21: mol_type = other RNA
ccacgcccggctaattttttg

SEQ ID NO: 6075 - RNA, 21 nt, synthetic construct
  misc_feature 1..21: note = Synthetic
  source 1..21: mol_type = other RNA
ccacggattcagccagatcat

SEQ ID NO: 6076 - RNA, 21 nt, synthetic construct
  misc_feature 1..21: note = Synthetic
  source 1..21: mol_type = other RNA
ccacgggaatggaagtgggta

SEQ ID NO: 6077 - RNA, 21 nt, synthetic construct
  misc_feature 1..21: note = Synthetic
  source 1..21: mol_type = other RNA
ccacgtcatcctccagactga

SEQ ID NO: 6078 - RNA, 21 nt, synthetic construct
  misc_feature 1..21: note = Synthetic
  source 1..21: mol_type = other RNA
ccacgtggctgaagatctcgg

SEQ ID NO: 6079 - RNA, 21 nt, synthetic construct
  misc_feature 1..21: note = Synthetic
  source 1..21: mol_type = other RNA
ccacgtgtcctcacggccaag

SEQ ID NO: 6080 - RNA, 21 nt, synthetic construct
  misc_feature 1..21: note = Synthetic
  source 1..21: mol_type = other RNA
ccacgttcctcaggttgggga

SEQ ID NO: 6081 - RNA, 21 nt, synthetic construct
  misc_feature 1..21: note = Synthetic
  source 1..21: mol_type = other RNA
ccactatctgtacagggacgc

SEQ ID NO: 6082 - RNA, 21 nt, synthetic construct
  misc_feature 1..21: note = Synthetic
  source 1..21: mol_type = other RNA
ccactcatacatacaacgggg

SEQ ID NO: 6083 - RNA, 21 nt, synthetic construct
  misc_feature 1..21: note = Synthetic
  source 1..21: mol_type = other RNA
ccactcatccgagccatcttc

SEQ ID NO: 6084 - RNA, 21 nt, synthetic construct
  misc_feature 1..21: note = Synthetic
  source 1..21: mol_type = other RNA
ccactgaatgttttcagtcac

SEQ ID NO: 6085 - RNA, 21 nt, synthetic construct
  misc_feature 1..21: note = Synthetic
  source 1..21: mol_type = other RNA
ccactgaggagatctagggtg

SEQ ID NO: 6086 - RNA, 21 nt, synthetic construct
  misc_feature 1..21: note = Synthetic
  source 1..21: mol_type = other RNA
ccactgcagcctcagcctctc

SEQ ID NO: 6087 - RNA, 21 nt, synthetic construct
  misc_feature 1..21: note = Synthetic
  source 1..21: mol_type = other RNA
ccactgcagcctcagcctctg

SEQ ID NO: 6088 - RNA, 21 nt, synthetic construct
  misc_feature 1..21: note = Synthetic
  source 1..21: mol_type = other RNA
ccactgcagtccccgccgcgg

SEQ ID NO: 6089 - RNA, 21 nt, synthetic construct
  misc_feature 1..21: note = Synthetic
  source 1..21: mol_type = other RNA
ccactgcgcccggcctcaccg

SEQ ID NO: 6090 - RNA, 21 nt, synthetic construct
  misc_feature 1..21: note = Synthetic
  source 1..21: mol_type = other RNA
ccacttaggcagtggaactcg

SEQ ID NO: 6091 - RNA, 21 nt, synthetic construct
  misc_feature 1..21: note = Synthetic
  source 1..21: mol_type = other RNA
ccacttgcttctctgggcctg

SEQ ID NO: 6092 - RNA, 21 nt, synthetic construct
  misc_feature 1..21: note = Synthetic
  source 1..21: mol_type = other RNA
ccacttggccatcgcacctcc

SEQ ID NO: 6093 - RNA, 21 nt, synthetic construct
  misc_feature 1..21: note = Synthetic
  source 1..21: mol_type = other RNA
ccacttgtaggagatgcattt

SEQ ID NO: 6094 - RNA, 21 nt, synthetic construct
  misc_feature 1..21: note = Synthetic
  source 1..21: mol_type = other RNA
ccagaaaggcttatcacggtt

SEQ ID NO: 6095 - RNA, 21 nt, synthetic construct
  misc_feature 1..21: note = Synthetic
  source 1..21: mol_type = other RNA
ccagaactgaggaatgcagcg

SEQ ID NO: 6096 - RNA, 21 nt, synthetic construct
  misc_feature 1..21: note = Synthetic
  source 1..21: mol_type = other RNA
ccagaagccactcatacatac

SEQ ID NO: 6097 - RNA, 21 nt, synthetic construct
  misc_feature 1..21: note = Synthetic
  source 1..21: mol_type = other RNA
ccagactgaccatcgaggggt

SEQ ID NO: 6098 - RNA, 21 nt, synthetic construct
  misc_feature 1..21: note = Synthetic
  source 1..21: mol_type = other RNA
ccagactgaccatctgtctcg

SEQ ID NO: 6099 - RNA, 21 nt, synthetic construct
  misc_feature 1..21: note = Synthetic
  source 1..21: mol_type = other RNA
ccagactgcggactgcagtgg

SEQ ID NO: 6100 - RNA, 21 nt, synthetic construct
  misc_feature 1..21: note = Synthetic
  source 1..21: mol_type = other RNA
ccagactggaggatttattta

SEQ ID NO: 6101 - RNA, 21 nt, synthetic construct
  misc_feature 1..21: note = Synthetic
  source 1..21: mol_type = other RNA
ccagagacccagctccgtggc

SEQ ID NO: 6102 - RNA, 21 nt, synthetic construct
  misc_feature 1..21: note = Synthetic
  source 1..21: mol_type = other RNA
ccagagcgaccacgttcctca

SEQ ID NO: 6103 - RNA, 21 nt, synthetic construct
  misc_feature 1..21: note = Synthetic
  source 1..21: mol_type = other RNA
ccagagcttggtgagacattg

SEQ ID NO: 6104 - RNA, 21 nt, synthetic construct
  misc_feature 1..21: note = Synthetic
  source 1..21: mol_type = other RNA
ccagaggccatgggctgctga

SEQ ID NO: 6105 - RNA, 21 nt, synthetic construct
  misc_feature 1..21: note = Synthetic
  source 1..21: mol_type = other RNA
ccagatcatttccgacgccat

SEQ ID NO: 6106 - RNA, 21 nt, synthetic construct
  misc_feature 1..21: note = Synthetic
  source 1..21: mol_type = other RNA
ccagatgaataaatatataaa

SEQ ID NO: 6107 - RNA, 21 nt, synthetic construct
  misc_feature 1..21: note = Synthetic
  source 1..21: mol_type = other RNA
ccagcaacgtcgcccagagct

SEQ ID NO: 6108 - RNA, 21 nt, synthetic construct
  misc_feature 1..21: note = Synthetic
  source 1..21: mol_type = other RNA
ccagcagcatgccgtccgggc

SEQ ID NO: 6109 - RNA, 21 nt, synthetic construct
  misc_feature 1..21: note = Synthetic
  source 1..21: mol_type = other RNA
ccagccccagggccccatgct

SEQ ID NO: 6110 - RNA, 21 nt, synthetic construct
  misc_feature 1..21: note = Synthetic
  source 1..21: mol_type = other RNA
ccagcccgtcgggggcctgga

SEQ ID NO: 6111 - RNA, 21 nt, synthetic construct
  misc_feature 1..21: note = Synthetic
  source 1..21: mol_type = other RNA
ccagcctcttttcatcctcca

SEQ ID NO: 6112 - RNA, 21 nt, synthetic construct
  misc_feature 1..21: note = Synthetic
  source 1..21: mol_type = other RNA
ccagcgagtagatgtccacac

SEQ ID NO: 6113 - RNA, 21 nt, synthetic construct
  misc_feature 1..21: note = Synthetic
  source 1..21: mol_type = other RNA
ccagcgcaatttccagcccca

SEQ ID NO: 6114 - RNA, 21 nt, synthetic construct
  misc_feature 1..21: note = Synthetic
  source 1..21: mol_type = other RNA
ccagcgtcatcttcctgacct

SEQ ID NO: 6115 - RNA, 21 nt, synthetic construct
  misc_feature 1..21: note = Synthetic
  source 1..21: mol_type = other RNA
ccagctcagcctcccaaagtg

SEQ ID NO: 6116 - RNA, 21 nt, synthetic construct
  misc_feature 1..21: note = Synthetic
  source 1..21: mol_type = other RNA
ccagctccgtggcgatgggga

SEQ ID NO: 6117 - RNA, 21 nt, synthetic construct
  misc_feature 1..21: note = Synthetic
  source 1..21: mol_type = other RNA
ccagctgatttttaacttttt

SEQ ID NO: 6118 - RNA, 21 nt, synthetic construct
  misc_feature 1..21: note = Synthetic
  source 1..21: mol_type = other RNA
ccagctggaagccgtcggggc

SEQ ID NO: 6119 - RNA, 21 nt, synthetic construct
  misc_feature 1..21: note = Synthetic
  source 1..21: mol_type = other RNA
ccagctggaagccttcctcac

SEQ ID NO: 6120 - RNA, 21 nt, synthetic construct
  misc_feature 1..21: note = Synthetic
  source 1..21: mol_type = other RNA
ccagctggagtggatgcactc

SEQ ID NO: 6121 - RNA, 21 nt, synthetic construct
  misc_feature 1..21: note = Synthetic
  source 1..21: mol_type = other RNA
ccaggacaaggtggggacgga

SEQ ID NO: 6122 - RNA, 21 nt, synthetic construct
  misc_feature 1..21: note = Synthetic
  source 1..21: mol_type = other RNA
ccaggacagagtcggtccagt

SEQ ID NO: 6123 - RNA, 21 nt, synthetic construct
  misc_feature 1..21: note = Synthetic
  source 1..21: mol_type = other RNA
ccaggagggcccaggataacg

SEQ ID NO: 6124 - RNA, 21 nt, synthetic construct
  misc_feature 1..21: note = Synthetic
  source 1..21: mol_type = other RNA
ccaggataacggagggcgact

SEQ ID NO: 6125 - RNA, 21 nt, synthetic construct
  misc_feature 1..21: note = Synthetic
  source 1..21: mol_type = other RNA
ccaggatggtctcgatctcct

SEQ ID NO: 6126 - RNA, 21 nt, synthetic construct
  misc_feature 1..21: note = Synthetic
  source 1..21: mol_type = other RNA
ccaggcaaaggaagacgagga

SEQ ID NO: 6127 - RNA, 21 nt, synthetic construct
  misc_feature 1..21: note = Synthetic
  source 1..21: mol_type = other RNA
ccaggcagatgttcacgccac

SEQ ID NO: 6128 - RNA, 21 nt, synthetic construct
  misc_feature 1..21: note = Synthetic
  source 1..21: mol_type = other RNA
ccaggcagccgggaggtgtcg

SEQ ID NO: 6129 - RNA, 21 nt, synthetic construct
  misc_feature 1..21: note = Synthetic
  source 1..21: mol_type = other RNA
ccaggcagtgtcccgacccgg

SEQ ID NO: 6130 - RNA, 21 nt, synthetic construct
  misc_feature 1..21: note = Synthetic
  source 1..21: mol_type = other RNA
ccaggccagactgcggactgc

SEQ ID NO: 6131 - RNA, 21 nt, synthetic construct
  misc_feature 1..21: note = Synthetic
  source 1..21: mol_type = other RNA
ccaggctggaaagcagtggca

SEQ ID NO: 6132 - RNA, 21 nt, synthetic construct
  misc_feature 1..21: note = Synthetic
  source 1..21: mol_type = other RNA
ccaggctggagtgcagtggct

SEQ ID NO: 6133 - RNA, 21 nt, synthetic construct
  misc_feature 1..21: note = Synthetic
  source 1..21: mol_type = other RNA
ccaggctggtgtcctgacagc

SEQ ID NO: 6134 - RNA, 21 nt, synthetic construct
  misc_feature 1..21: note = Synthetic
  source 1..21: mol_type = other RNA
ccagggccccatgctcgcagc

SEQ ID NO: 6135 - RNA, 21 nt, synthetic construct
  misc_feature 1..21: note = Synthetic
  source 1..21: mol_type = other RNA
ccagggggtcccgttggtgcc

SEQ ID NO: 6136 - RNA, 21 nt, synthetic construct
  misc_feature 1..21: note = Synthetic
  source 1..21: mol_type = other RNA
ccaggggtggccccaggcagc

SEQ ID NO: 6137 - RNA, 21 nt, synthetic construct
  misc_feature 1..21: note = Synthetic
  source 1..21: mol_type = other RNA
ccagggtgatgcattcgccgc

SEQ ID NO: 6138 - RNA, 21 nt, synthetic construct
  misc_feature 1..21: note = Synthetic
  source 1..21: mol_type = other RNA
ccagggtttgcaaaaataaat

SEQ ID NO: 6139 - RNA, 21 nt, synthetic construct
  misc_feature 1..21: note = Synthetic
  source 1..21: mol_type = other RNA
ccaggttcacgcagagctggc

SEQ ID NO: 6140 - RNA, 21 nt, synthetic construct
  misc_feature 1..21: note = Synthetic
  source 1..21: mol_type = other RNA
ccagtacatgaagccatgaac

SEQ ID NO: 6141 - RNA, 21 nt, synthetic construct
  misc_feature 1..21: note = Synthetic
  source 1..21: mol_type = other RNA
ccagtagaggcggccactgag

SEQ ID NO: 6142 - RNA, 21 nt, synthetic construct
  misc_feature 1..21: note = Synthetic
  source 1..21: mol_type = other RNA
ccagtagatgttgctgtggat

SEQ ID NO: 6143 - RNA, 21 nt, synthetic construct
  misc_feature 1..21: note = Synthetic
  source 1..21: mol_type = other RNA
ccagtagattctattgctggc

SEQ ID NO: 6144 - RNA, 21 nt, synthetic construct
  misc_feature 1..21: note = Synthetic
  source 1..21: mol_type = other RNA
ccagtcagtccagtacatgaa

SEQ ID NO: 6145 - RNA, 21 nt, synthetic construct
  misc_feature 1..21: note = Synthetic
  source 1..21: mol_type = other RNA
ccagtccacagccagcccgtc

SEQ ID NO: 6146 - RNA, 21 nt, synthetic construct
  misc_feature 1..21: note = Synthetic
  source 1..21: mol_type = other RNA
ccagtcccggcagtctctagc

SEQ ID NO: 6147 - RNA, 21 nt, synthetic construct
  misc_feature 1..21: note = Synthetic
  source 1..21: mol_type = other RNA
ccagtgactcaggctctgcct

SEQ ID NO: 6148 - RNA, 21 nt, synthetic construct
  misc_feature 1..21: note = Synthetic
  source 1..21: mol_type = other RNA
ccagttcactcctcttggctg

SEQ ID NO: 6149 - RNA, 21 nt, synthetic construct
  misc_feature 1..21: note = Synthetic
  source 1..21: mol_type = other RNA
ccagttcgtgcaaataatctt

SEQ ID NO: 6150 - RNA, 21 nt, synthetic construct
  misc_feature 1..21: note = Synthetic
  source 1..21: mol_type = other RNA
ccagttcttccatagaaggaa

SEQ ID NO: 6151 - RNA, 21 nt, synthetic construct
  misc_feature 1..21: note = Synthetic
  source 1..21: mol_type = other RNA
ccatagaaggaagacccccag

SEQ ID NO: 6152 - RNA, 21 nt, synthetic construct
  misc_feature 1..21: note = Synthetic
  source 1..21: mol_type = other RNA
ccatatcctctggggacagta

SEQ ID NO: 6153 - RNA, 21 nt, synthetic construct
  misc_feature 1..21: note = Synthetic
  source 1..21: mol_type = other RNA
ccatcaacgacaagattgggg

SEQ ID NO: 6154 - RNA, 21 nt, synthetic construct
  misc_feature 1..21: note = Synthetic
  source 1..21: mol_type = other RNA
ccatcacagcgccagctggag

SEQ ID NO: 6155 - RNA, 21 nt, synthetic construct
  misc_feature 1..21: note = Synthetic
  source 1..21: mol_type = other RNA
ccatcagagcactggaattcg

SEQ ID NO: 6156 - RNA, 21 nt, synthetic construct
  misc_feature 1..21: note = Synthetic
  source 1..21: mol_type = other RNA
ccatcccaacacacacgacag

SEQ ID NO: 6157 - RNA, 21 nt, synthetic construct
  misc_feature 1..21: note = Synthetic
  source 1..21: mol_type = other RNA
ccatcctcccacctcagcctc

SEQ ID NO: 6158 - RNA, 21 nt, synthetic construct
  misc_feature 1..21: note = Synthetic
  source 1..21: mol_type = other RNA
ccatcctggcactcagcgctg

SEQ ID NO: 6159 - RNA, 21 nt, synthetic construct
  misc_feature 1..21: note = Synthetic
  source 1..21: mol_type = other RNA
ccatcgaggggtagctgtagc

SEQ ID NO: 6160 - RNA, 21 nt, synthetic construct
  misc_feature 1..21: note = Synthetic
  source 1..21: mol_type = other RNA
ccatcgcacctccagaactga

SEQ ID NO: 6161 - RNA, 21 nt, synthetic construct
  misc_feature 1..21: note = Synthetic
  source 1..21: mol_type = other RNA
ccatcgcagacccacttgtag

SEQ ID NO: 6162 - RNA, 21 nt, synthetic construct
  misc_feature 1..21: note = Synthetic
  source 1..21: mol_type = other RNA
ccatcgtggcagcgaaactcg

SEQ ID NO: 6163 - RNA, 21 nt, synthetic construct
  misc_feature 1..21: note = Synthetic
  source 1..21: mol_type = other RNA
ccatctcccagaagccactca

SEQ ID NO: 6164 - RNA, 21 nt, synthetic construct
  misc_feature 1..21: note = Synthetic
  source 1..21: mol_type = other RNA
ccatctgctgttgtgtgttga

SEQ ID NO: 6165 - RNA, 21 nt, synthetic construct
  misc_feature 1..21: note = Synthetic
  source 1..21: mol_type = other RNA
ccatctgtctcgaggggtagc

SEQ ID NO: 6166 - RNA, 21 nt, synthetic construct
  misc_feature 1..21: note = Synthetic
  source 1..21: mol_type = other RNA
ccatcttcgcagtcggggtcg

SEQ ID NO: 6167 - RNA, 21 nt, synthetic construct
  misc_feature 1..21: note = Synthetic
  source 1..21: mol_type = other RNA
ccatgaacaggatccaccacg

SEQ ID NO: 6168 - RNA, 21 nt, synthetic construct
  misc_feature 1..21: note = Synthetic
  source 1..21: mol_type = other RNA
ccatgaatccctttcctggct

SEQ ID NO: 6169 - RNA, 21 nt, synthetic construct
  misc_feature 1..21: note = Synthetic
  source 1..21: mol_type = other RNA
ccatgcatggtttttttttgt

SEQ ID NO: 6170 - RNA, 21 nt, synthetic construct
  misc_feature 1..21: note = Synthetic
  source 1..21: mol_type = other RNA
ccatgcctggccagaggccat

SEQ ID NO: 6171 - RNA, 21 nt, synthetic construct
  misc_feature 1..21: note = Synthetic
  source 1..21: mol_type = other RNA
ccatgctcgcagcctctgcca

SEQ ID NO: 6172 - RNA, 21 nt, synthetic construct
  misc_feature 1..21: note = Synthetic
  source 1..21: mol_type = other RNA
ccatggatgcagtttccatca

SEQ ID NO: 6173 - RNA, 21 nt, synthetic construct
  misc_feature 1..21: note = Synthetic
  source 1..21: mol_type = other RNA
ccatgggctgctgatgcacca

SEQ ID NO: 6174 - RNA, 21 nt, synthetic construct
  misc_feature 1..21: note = Synthetic
  source 1..21: mol_type = other RNA
ccatgttgcagactttgtcca

SEQ ID NO: 6175 - RNA, 21 nt, synthetic construct
  misc_feature 1..21: note = Synthetic
  source 1..21: mol_type = other RNA
ccatgtttgaggattgtgtca

SEQ ID NO: 6176 - RNA, 21 nt, synthetic construct
  misc_feature 1..21: note = Synthetic
  source 1..21: mol_type = other RNA
ccattcaggccccctttcttg

SEQ ID NO: 6177 - RNA, 21 nt, synthetic construct
  misc_feature 1..21: note = Synthetic
  source 1..21: mol_type = other RNA
ccattctcctgcctcagcctc

SEQ ID NO: 6178 - RNA, 21 nt, synthetic construct
  misc_feature 1..21: note = Synthetic
  source 1..21: mol_type = other RNA
ccattgcatgggcactgtccg

SEQ ID NO: 6179 - RNA, 21 nt, synthetic construct
  misc_feature 1..21: note = Synthetic
  source 1..21: mol_type = other RNA
ccattgctcagggtggtcctc

SEQ ID NO: 6180 - RNA, 21 nt, synthetic construct
  misc_feature 1..21: note = Synthetic
  source 1..21: mol_type = other RNA
ccattgggccactgaatgttt

SEQ ID NO: 6181 - RNA, 21 nt, synthetic construct
  misc_feature 1..21: note = Synthetic
  source 1..21: mol_type = other RNA
cccaaaaagcgttgcacacag

SEQ ID NO: 6182 - RNA, 21 nt, synthetic construct
  misc_feature 1..21: note = Synthetic
  source 1..21: mol_type = other RNA
cccaaagtgctgggattacag

SEQ ID NO: 6183 - RNA, 21 nt, synthetic construct
  misc_feature 1..21: note = Synthetic
  source 1..21: mol_type = other RNA
cccaacacacacgacagaaaa

SEQ ID NO: 6184 - RNA, 21 nt, synthetic construct
  misc_feature 1..21: note = Synthetic
  source 1..21: mol_type = other RNA
cccaacccaagccattgcatg

SEQ ID NO: 6185 - RNA, 21 nt, synthetic construct
  misc_feature 1..21: note = Synthetic
  source 1..21: mol_type = other RNA
cccaagccattgcatgggcac

SEQ ID NO: 6186 - RNA, 21 nt, synthetic construct
  misc_feature 1..21: note = Synthetic
  source 1..21: mol_type = other RNA
cccaagtagctgggatcacag

SEQ ID NO: 6187 - RNA, 21 nt, synthetic construct
  misc_feature 1..21: note = Synthetic
  source 1..21: mol_type = other RNA
cccacagccttgcaggccttc

SEQ ID NO: 6188 - RNA, 21 nt, synthetic construct
  misc_feature 1..21: note = Synthetic
  source 1..21: mol_type = other RNA
cccacagctgaagtccccgga

SEQ ID NO: 6189 - RNA, 21 nt, synthetic construct
  misc_feature 1..21: note = Synthetic
  source 1..21: mol_type = other RNA
cccacagctgggggatgcagg

SEQ ID NO: 6190 - RNA, 21 nt, synthetic construct
  misc_feature 1..21: note = Synthetic
  source 1..21: mol_type = other RNA
cccacctcagcctcgccatgc

SEQ ID NO: 6191 - RNA, 21 nt, synthetic construct
  misc_feature 1..21: note = Synthetic
  source 1..21: mol_type = other RNA
cccacctcgaaagacactggg

SEQ ID NO: 6192 - RNA, 21 nt, synthetic construct
  misc_feature 1..21: note = Synthetic
  source 1..21: mol_type = other RNA
cccacgtggctgaagatctcg

SEQ ID NO: 6193 - RNA, 21 nt, synthetic construct
  misc_feature 1..21: note = Synthetic
  source 1..21: mol_type = other RNA
cccactatctgtacagggacg

SEQ ID NO: 6194 - RNA, 21 nt, synthetic construct
  misc_feature 1..21: note = Synthetic
  source 1..21: mol_type = other RNA
cccactgcagtccccgccgcg

SEQ ID NO: 6195 - RNA, 21 nt, synthetic construct
  misc_feature 1..21: note = Synthetic
  source 1..21: mol_type = other RNA
cccacttgtaggagatgcatt

SEQ ID NO: 6196 - RNA, 21 nt, synthetic construct
  misc_feature 1..21: note = Synthetic
  source 1..21: mol_type = other RNA
cccagaagccactcatacata

SEQ ID NO: 6197 - RNA, 21 nt, synthetic construct
  misc_feature 1..21: note = Synthetic
  source 1..21: mol_type = other RNA
cccagagcttggtgagacatt

SEQ ID NO: 6198 - RNA, 21 nt, synthetic construct
  misc_feature 1..21: note = Synthetic
  source 1..21: mol_type = other RNA
cccagatgaataaatatataa

SEQ ID NO: 6199 - RNA, 21 nt, synthetic construct
  misc_feature 1..21: note = Synthetic
  source 1..21: mol_type = other RNA
cccagctccgtggcgatgggg

SEQ ID NO: 6200 - RNA, 21 nt, synthetic construct
  misc_feature 1..21: note = Synthetic
  source 1..21: mol_type = other RNA
cccagctgatttttaactttt

SEQ ID NO: 6201 - RNA, 21 nt, synthetic construct
  misc_feature 1..21: note = Synthetic
  source 1..21: mol_type = other RNA
cccaggacaaggtggggacgg

SEQ ID NO: 6202 - RNA, 21 nt, synthetic construct
  misc_feature 1..21: note = Synthetic
  source 1..21: mol_type = other RNA
cccaggacagagtcggtccag

SEQ ID NO: 6203 - RNA, 21 nt, synthetic construct
  misc_feature 1..21: note = Synthetic
  source 1..21: mol_type = other RNA
cccaggataacggagggcgac

SEQ ID NO: 6204 - RNA, 21 nt, synthetic construct
  misc_feature 1..21: note = Synthetic
  source 1..21: mol_type = other RNA
cccaggcaaaggaagacgagg

SEQ ID NO: 6205 - RNA, 21 nt, synthetic construct
  misc_feature 1..21: note = Synthetic
  source 1..21: mol_type = other RNA
cccaggcagccgggaggtgtc

SEQ ID NO: 6206 - RNA, 21 nt, synthetic construct
  misc_feature 1..21: note = Synthetic
  source 1..21: mol_type = other RNA
cccaggccagactgcggactg

SEQ ID NO: 6207 - RNA, 21 nt, synthetic construct
  misc_feature 1..21: note = Synthetic
  source 1..21: mol_type = other RNA
cccaggctggaaagcagtggc

SEQ ID NO: 6208 - RNA, 21 nt, synthetic construct
  misc_feature 1..21: note = Synthetic
  source 1..21: mol_type = other RNA
cccaggctggagtgcagtggc

SEQ ID NO: 6209 - RNA, 21 nt, synthetic construct
  misc_feature 1..21: note = Synthetic
  source 1..21: mol_type = other RNA
cccagggccccatgctcgcag

SEQ ID NO: 6210 - RNA, 21 nt, synthetic construct
  misc_feature 1..21: note = Synthetic
  source 1..21: mol_type = other RNA
cccaggggtggccccaggcag

SEQ ID NO: 6211 - RNA, 21 nt, synthetic construct
  misc_feature 1..21: note = Synthetic
  source 1..21: mol_type = other RNA
cccagtagaggcggccactga

SEQ ID NO: 6212 - RNA, 21 nt, synthetic construct
  misc_feature 1..21: note = Synthetic
  source 1..21: mol_type = other RNA
cccagtcagtccagtacatga

SEQ ID NO: 6213 - RNA, 21 nt, synthetic construct
  misc_feature 1..21: note = Synthetic
  source 1..21: mol_type = other RNA
cccatcaacgacaagattggg

SEQ ID NO: 6214 - RNA, 21 nt, synthetic construct
  misc_feature 1..21: note = Synthetic
  source 1..21: mol_type = other RNA
cccatcccaacacacacgaca

SEQ ID NO: 6215 - RNA, 21 nt, synthetic construct
  misc_feature 1..21: note = Synthetic
  source 1..21: mol_type = other RNA
cccatcgtggcagcgaaactc

SEQ ID NO: 6216 - RNA, 21 nt, synthetic construct
  misc_feature 1..21: note = Synthetic
  source 1..21: mol_type = other RNA
cccatctcccagaagccactc

SEQ ID NO: 6217 - RNA, 21 nt, synthetic construct
  misc_feature 1..21: note = Synthetic
  source 1..21: mol_type = other RNA
cccatgctcgcagcctctgcc

SEQ ID NO: 6218 - RNA, 21 nt, synthetic construct
  misc_feature 1..21: note = Synthetic
  source 1..21: mol_type = other RNA
ccccacagctgaagtccccgg

SEQ ID NO: 6219 - RNA, 21 nt, synthetic construct
  misc_feature 1..21: note = Synthetic
  source 1..21: mol_type = other RNA
ccccactatctgtacagggac

SEQ ID NO: 6220 - RNA, 21 nt, synthetic construct
  misc_feature 1..21: note = Synthetic
  source 1..21: mol_type = other RNA
ccccaggacaaggtggggacg

SEQ ID NO: 6221 - RNA, 21 nt, synthetic construct
  misc_feature 1..21: note = Synthetic
  source 1..21: mol_type = other RNA
ccccaggcaaaggaagacgag

SEQ ID NO: 6222 - RNA, 21 nt, synthetic construct
  misc_feature 1..21: note = Synthetic
  source 1..21: mol_type = other RNA
ccccaggcagccgggaggtgt

SEQ ID NO: 6223 - RNA, 21 nt, synthetic construct
  misc_feature 1..21: note = Synthetic
  source 1..21: mol_type = other RNA
ccccagggccccatgctcgca

SEQ ID NO: 6224 - RNA, 21 nt, synthetic construct
  misc_feature 1..21: note = Synthetic
  source 1..21: mol_type = other RNA
ccccagtcagtccagtacatg

SEQ ID NO: 6225 - RNA, 21 nt, synthetic construct
  misc_feature 1..21: note = Synthetic
  source 1..21: mol_type = other RNA
ccccatgctcgcagcctctgc

SEQ ID NO: 6226 - RNA, 21 nt, synthetic construct
  misc_feature 1..21: note = Synthetic
  source 1..21: mol_type = other RNA
cccccacagctgaagtccccg

SEQ ID NO: 6227 - RNA, 21 nt, synthetic construct
  misc_feature 1..21: note = Synthetic
  source 1..21: mol_type = other RNA
cccccaggacaaggtggggac

SEQ ID NO: 6228 - RNA, 21 nt, synthetic construct
  misc_feature 1..21: note = Synthetic
  source 1..21: mol_type = other RNA
cccccaggcaaaggaagacga

SEQ ID NO: 6229 - RNA, 21 nt, synthetic construct
  misc_feature 1..21: note = Synthetic
  source 1..21: mol_type = other RNA
ccccccaggacaaggtgggga

SEQ ID NO: 6230 - RNA, 21 nt, synthetic construct
  misc_feature 1..21: note = Synthetic
  source 1..21: mol_type = other RNA
ccccccgggcctgtttctctt

SEQ ID NO: 6231 - RNA, 21 nt, synthetic construct
  misc_feature 1..21: note = Synthetic
  source 1..21: mol_type = other RNA
cccccgagaccagagacccag

SEQ ID NO: 6232 - RNA, 21 nt, synthetic construct
  misc_feature 1..21: note = Synthetic
  source 1..21: mol_type = other RNA
cccccgggcctgtttctctta

SEQ ID NO: 6233 - RNA, 21 nt, synthetic construct
  misc_feature 1..21: note = Synthetic
  source 1..21: mol_type = other RNA
cccccgttgacatcgatgctt

SEQ ID NO: 6234 - RNA, 21 nt, synthetic construct
  misc_feature 1..21: note = Synthetic
  source 1..21: mol_type = other RNA
ccccctacacagggccccgag

SEQ ID NO: 6235 - RNA, 21 nt, synthetic construct
  misc_feature 1..21: note = Synthetic
  source 1..21: mol_type = other RNA
ccccctttcttgatcttggcg

SEQ ID NO: 6236 - RNA, 21 nt, synthetic construct
  misc_feature 1..21: note = Synthetic
  source 1..21: mol_type = other RNA
ccccgagaatagtcactgaac

SEQ ID NO: 6237 - RNA, 21 nt, synthetic construct
  misc_feature 1..21: note = Synthetic
  source 1..21: mol_type = other RNA
ccccgagaccagagacccagc

SEQ ID NO: 6238 - RNA, 21 nt, synthetic construct
  misc_feature 1..21: note = Synthetic
  source 1..21: mol_type = other RNA
ccccgccgcggcgaggagcaa

SEQ ID NO: 6239 - RNA, 21 nt, synthetic construct
  misc_feature 1..21: note = Synthetic
  source 1..21: mol_type = other RNA
ccccggatttgcaggtgacag

SEQ ID NO: 6240 - RNA, 21 nt, synthetic construct
  misc_feature 1..21: note = Synthetic
  source 1..21: mol_type = other RNA
ccccggcattcattgacacgg

SEQ ID NO: 6241 - RNA, 21 nt, synthetic construct
  misc_feature 1..21: note = Synthetic
  source 1..21: mol_type = other RNA
ccccgggcctgtttctcttat

SEQ ID NO: 6242 - RNA, 21 nt, synthetic construct
  misc_feature 1..21: note = Synthetic
  source 1..21: mol_type = other RNA
ccccgttgacatcgatgcttg

SEQ ID NO: 6243 - RNA, 21 nt, synthetic construct
  misc_feature 1..21: note = Synthetic
  source 1..21: mol_type = other RNA
cccctacacagggccccgaga

SEQ ID NO: 6244 - RNA, 21 nt, synthetic construct
  misc_feature 1..21: note = Synthetic
  source 1..21: mol_type = other RNA
cccctacagcgctgcggccac

SEQ ID NO: 6245 - RNA, 21 nt, synthetic construct
  misc_feature 1..21: note = Synthetic
  source 1..21: mol_type = other RNA
cccctcccctttcatcttcca

SEQ ID NO: 6246 - RNA, 21 nt, synthetic construct
  misc_feature 1..21: note = Synthetic
  source 1..21: mol_type = other RNA
cccctctctgtccccggcatt

SEQ ID NO: 6247 - RNA, 21 nt, synthetic construct
  misc_feature 1..21: note = Synthetic
  source 1..21: mol_type = other RNA
cccctctgtgaacttgatcgg

SEQ ID NO: 6248 - RNA, 21 nt, synthetic construct
  misc_feature 1..21: note = Synthetic
  source 1..21: mol_type = other RNA
ccccttggaacacgtaaagac

SEQ ID NO: 6249 - RNA, 21 nt, synthetic construct
  misc_feature 1..21: note = Synthetic
  source 1..21: mol_type = other RNA
cccctttcatcttccatgttt

SEQ ID NO: 6250 - RNA, 21 nt, synthetic construct
  misc_feature 1..21: note = Synthetic
  source 1..21: mol_type = other RNA
cccctttcttgatcttggcgg

SEQ ID NO: 6251 - RNA, 21 nt, synthetic construct
  misc_feature 1..21: note = Synthetic
  source 1..21: mol_type = other RNA
cccgacccggatcacgacctg

SEQ ID NO: 6252 - RNA, 21 nt, synthetic construct
  misc_feature 1..21: note = Synthetic
  source 1..21: mol_type = other RNA
cccgagaatagtcactgaaca

SEQ ID NO: 6253 - RNA, 21 nt, synthetic construct
  misc_feature 1..21: note = Synthetic
  source 1..21: mol_type = other RNA
cccgagaccagagacccagct

SEQ ID NO: 6254 - RNA, 21 nt, synthetic construct
  misc_feature 1..21: note = Synthetic
  source 1..21: mol_type = other RNA
cccgagtagctgggactacag

SEQ ID NO: 6255 - RNA, 21 nt, synthetic construct
  misc_feature 1..21: note = Synthetic
  source 1..21: mol_type = other RNA
cccgcactctttgatgggttc

SEQ ID NO: 6256 - RNA, 21 nt, synthetic construct
  misc_feature 1..21: note = Synthetic
  source 1..21: mol_type = other RNA
cccgccaccacgcccggctaa

SEQ ID NO: 6257 - RNA, 21 nt, synthetic construct
  misc_feature 1..21: note = Synthetic
  source 1..21: mol_type = other RNA
cccgccgcggcgaggagcaag

SEQ ID NO: 6258 - RNA, 21 nt, synthetic construct
  misc_feature 1..21: note = Synthetic
  source 1..21: mol_type = other RNA
cccgcctcggcctcccaaagt

SEQ ID NO: 6259 - RNA, 21 nt, synthetic construct
  misc_feature 1..21: note = Synthetic
  source 1..21: mol_type = other RNA
cccggatcacgacctgctgtg

SEQ ID NO: 6260 - RNA, 21 nt, synthetic construct
  misc_feature 1..21: note = Synthetic
  source 1..21: mol_type = other RNA
cccggatttgcaggtgacaga

SEQ ID NO: 6261 - RNA, 21 nt, synthetic construct
  misc_feature 1..21: note = Synthetic
  source 1..21: mol_type = other RNA
cccggcagtctctagccatgt

SEQ ID NO: 6262 - RNA, 21 nt, synthetic construct
  misc_feature 1..21: note = Synthetic
  source 1..21: mol_type = other RNA
cccggcattcattgacacggg

SEQ ID NO: 6263 - RNA, 21 nt, synthetic construct
  misc_feature 1..21: note = Synthetic
  source 1..21: mol_type = other RNA
cccggcctcaccgtgcatgtt

SEQ ID NO: 6264 - RNA, 21 nt, synthetic construct
  misc_feature 1..21: note = Synthetic
  source 1..21: mol_type = other RNA
cccggctaattttttgtattt

SEQ ID NO: 6265 - RNA, 21 nt, synthetic construct
  misc_feature 1..21: note = Synthetic
  source 1..21: mol_type = other RNA
cccgggacttgtcgtcgcctt

SEQ ID NO: 6266 - RNA, 21 nt, synthetic construct
  misc_feature 1..21: note = Synthetic
  source 1..21: mol_type = other RNA
cccgggcctgtttctcttatc

SEQ ID NO: 6267 - RNA, 21 nt, synthetic construct
  misc_feature 1..21: note = Synthetic
  source 1..21: mol_type = other RNA
cccgggttcacaccattctcc

SEQ ID NO: 6268 - RNA, 21 nt, synthetic construct
  misc_feature 1..21: note = Synthetic
  source 1..21: mol_type = other RNA
cccggtcaacctgcccctctc

SEQ ID NO: 6269 - RNA, 21 nt, synthetic construct
  misc_feature 1..21: note = Synthetic
  source 1..21: mol_type = other RNA
cccggtcacactgccggctgc

SEQ ID NO: 6270 - RNA, 21 nt, synthetic construct
  misc_feature 1..21: note = Synthetic
  source 1..21: mol_type = other RNA
cccggtctgagtcacagacga

SEQ ID NO: 6271 - RNA, 21 nt, synthetic construct
  misc_feature 1..21: note = Synthetic
  source 1..21: mol_type = other RNA
cccgtcaaacgatccagactg

SEQ ID NO: 6272 - RNA, 21 nt, synthetic construct
  misc_feature 1..21: note = Synthetic
  source 1..21: mol_type = other RNA
cccgtcgggggcctggatgtc

SEQ ID NO: 6273 - RNA, 21 nt, synthetic construct
  misc_feature 1..21: note = Synthetic
  source 1..21: mol_type = other RNA
cccgtcttggcactggaactc

SEQ ID NO: 6274 - RNA, 21 nt, synthetic construct
  misc_feature 1..21: note = Synthetic
  source 1..21: mol_type = other RNA
cccgttgacatcgatgcttga

SEQ ID NO: 6275 - RNA, 21 nt, synthetic construct
  misc_feature 1..21: note = Synthetic
  source 1..21: mol_type = other RNA
cccgttggtgccatctgctgt

SEQ ID NO: 6276 - RNA, 21 nt, synthetic construct
  misc_feature 1..21: note = Synthetic
  source 1..21: mol_type = other RNA
ccctacacagggccccgagaa

SEQ ID NO: 6277 - RNA, 21 nt, synthetic construct
  misc_feature 1..21: note = Synthetic
  source 1..21: mol_type = other RNA
ccctacagcgctgcggccact

SEQ ID NO: 6278 - RNA, 21 nt, synthetic construct
  misc_feature 1..21: note = Synthetic
  source 1..21: mol_type = other RNA
ccctcacgctactgggcttct

SEQ ID NO: 6279 - RNA, 21 nt, synthetic construct
  misc_feature 1..21: note = Synthetic
  source 1..21: mol_type = other RNA
ccctccaggttcacgcagagc

SEQ ID NO: 6280 - RNA, 21 nt, synthetic construct
  misc_feature 1..21: note = Synthetic
  source 1..21: mol_type = other RNA
ccctcccctttcatcttccat

SEQ ID NO: 6281 - RNA, 21 nt, synthetic construct
  misc_feature 1..21: note = Synthetic
  source 1..21: mol_type = other RNA
ccctcgcagagtgtcacatta

SEQ ID NO: 6282 - RNA, 21 nt, synthetic construct
  misc_feature 1..21: note = Synthetic
  source 1..21: mol_type = other RNA
ccctcgcagagtgtcagacag

SEQ ID NO: 6283 - RNA, 21 nt, synthetic construct
  misc_feature 1..21: note = Synthetic
  source 1..21: mol_type = other RNA
ccctctctgtccccggcattc

SEQ ID NO: 6284 - RNA, 21 nt, synthetic construct
  misc_feature 1..21: note = Synthetic
  source 1..21: mol_type = other RNA
ccctctgtgaacttgatcggg

SEQ ID NO: 6285 - RNA, 21 nt, synthetic construct
  misc_feature 1..21: note = Synthetic
  source 1..21: mol_type = other RNA
ccctgaataacgttttcctct

SEQ ID NO: 6286 - RNA, 21 nt, synthetic construct
  misc_feature 1..21: note = Synthetic
  source 1..21: mol_type = other RNA
ccctgcactgggggggacaca

SEQ ID NO: 6287 - RNA, 21 nt, synthetic construct
  misc_feature 1..21: note = Synthetic
  source 1..21: mol_type = other RNA
ccctggccagcagcatgccgt

SEQ ID NO: 6288 - RNA, 21 nt, synthetic construct
  misc_feature 1..21: note = Synthetic
  source 1..21: mol_type = other RNA
ccctggcctgggatcccatcc

SEQ ID NO: 6289 - RNA, 21 nt, synthetic construct
  misc_feature 1..21: note = Synthetic
  source 1..21: mol_type = other RNA
ccctggcttcccgcgattgca

SEQ ID NO: 6290 - RNA, 21 nt, synthetic construct
  misc_feature 1..21: note = Synthetic
  source 1..21: mol_type = other RNA
ccctggggacaattgccaatc

SEQ ID NO: 6291 - RNA, 21 nt, synthetic construct
  misc_feature 1..21: note = Synthetic
  source 1..21: mol_type = other RNA
cccttggaacacgtaaagacc

SEQ ID NO: 6292 - RNA, 21 nt, synthetic construct
  misc_feature 1..21: note = Synthetic
  source 1..21: mol_type = other RNA
cccttggcttggagccgttct

SEQ ID NO: 6293 - RNA, 21 nt, synthetic construct
  misc_feature 1..21: note = Synthetic
  source 1..21: mol_type = other RNA
cccttggtatccgcaacagag

SEQ ID NO: 6294 - RNA, 21 nt, synthetic construct
  misc_feature 1..21: note = Synthetic
  source 1..21: mol_type = other RNA
cccttgtgacatcttcacgcg

SEQ ID NO: 6295 - RNA, 21 nt, synthetic construct
  misc_feature 1..21: note = Synthetic
  source 1..21: mol_type = other RNA
ccctttcatcttccatgtttg

SEQ ID NO: 6296 - RNA, 21 nt, synthetic construct
  misc_feature 1..21: note = Synthetic
  source 1..21: mol_type = other RNA
ccctttcctggcttaaggaag

SEQ ID NO: 6297 - RNA, 21 nt, synthetic construct
  misc_feature 1..21: note = Synthetic
  source 1..21: mol_type = other RNA
ccctttcttgatcttggcggg

SEQ ID NO: 6298 - RNA, 21 nt, synthetic construct
  misc_feature 1..21: note = Synthetic
  source 1..21: mol_type = other RNA
ccgaaaccagaaaggcttatc

SEQ ID NO: 6299 - RNA, 21 nt, synthetic construct
  misc_feature 1..21: note = Synthetic
  source 1..21: mol_type = other RNA
ccgaagcctgttctgcctccc

SEQ ID NO: 6300 - RNA, 21 nt, synthetic construct
  misc_feature 1..21: note = Synthetic
  source 1..21: mol_type = other RNA
ccgacccggatcacgacctgc

SEQ ID NO: 6301 - RNA, 21 nt, synthetic construct
  misc_feature 1..21: note = Synthetic
  source 1..21: mol_type = other RNA
ccgacgccatgaatccctttc

SEQ ID NO: 6302 - RNA, 21 nt, synthetic construct
  misc_feature 1..21: note = Synthetic
  source 1..21: mol_type = other RNA
ccgagaatagtcactgaacaa

SEQ ID NO: 6303 - RNA, 21 nt, synthetic construct
  misc_feature 1..21: note = Synthetic
  source 1..21: mol_type = other RNA
ccgagaccagagacccagctc

SEQ ID NO: 6304 - RNA, 21 nt, synthetic construct
  misc_feature 1..21: note = Synthetic
  source 1..21: mol_type = other RNA
ccgagagatgcacttcccatc

SEQ ID NO: 6305 - RNA, 21 nt, synthetic construct
  misc_feature 1..21: note = Synthetic
  source 1..21: mol_type = other RNA
ccgagcaggggctactgtccc

SEQ ID NO: 6306 - RNA, 21 nt, synthetic construct
  misc_feature 1..21: note = Synthetic
  source 1..21: mol_type = other RNA
ccgagccatcttcgcagtcgg

SEQ ID NO: 6307 - RNA, 21 nt, synthetic construct
  misc_feature 1..21: note = Synthetic
  source 1..21: mol_type = other RNA
ccgaggccttgagggtggccg

SEQ ID NO: 6308 - RNA, 21 nt, synthetic construct
  misc_feature 1..21: note = Synthetic
  source 1..21: mol_type = other RNA
ccgagtagctgggactacagg

SEQ ID NO: 6309 - RNA, 21 nt, synthetic construct
  misc_feature 1..21: note = Synthetic
  source 1..21: mol_type = other RNA
ccgatcttaaggtcattgcag

SEQ ID NO: 6310 - RNA, 21 nt, synthetic construct
  misc_feature 1..21: note = Synthetic
  source 1..21: mol_type = other RNA
ccgcaacagagacagtgccca

SEQ ID NO: 6311 - RNA, 21 nt, synthetic construct
  misc_feature 1..21: note = Synthetic
  source 1..21: mol_type = other RNA
ccgcactctttgatgggttca

SEQ ID NO: 6312 - RNA, 21 nt, synthetic construct
  misc_feature 1..21: note = Synthetic
  source 1..21: mol_type = other RNA
ccgccaccacgcccggctaat

SEQ ID NO: 6313 - RNA, 21 nt, synthetic construct
  misc_feature 1..21: note = Synthetic
  source 1..21: mol_type = other RNA
ccgccagttcttccatagaag

SEQ ID NO: 6314 - RNA, 21 nt, synthetic construct
  misc_feature 1..21: note = Synthetic
  source 1..21: mol_type = other RNA
ccgccattgctcagggtggtc

SEQ ID NO: 6315 - RNA, 21 nt, synthetic construct
  misc_feature 1..21: note = Synthetic
  source 1..21: mol_type = other RNA
ccgccgcggcgaggagcaagg

SEQ ID NO: 6316 - RNA, 21 nt, synthetic construct
  misc_feature 1..21: note = Synthetic
  source 1..21: mol_type = other RNA
ccgccgttgttgtccaagcat

SEQ ID NO: 6317 - RNA, 21 nt, synthetic construct
  misc_feature 1..21: note = Synthetic
  source 1..21: mol_type = other RNA
ccgcctcggcctcccaaagtg

SEQ ID NO: 6318 - RNA, 21 nt, synthetic construct
  misc_feature 1..21: note = Synthetic
  source 1..21: mol_type = other RNA
ccgcggaggaacgccaggcct

SEQ ID NO: 6319 - RNA, 21 nt, synthetic construct
  misc_feature 1..21: note = Synthetic
  source 1..21: mol_type = other RNA
ccgcggcgaggagcaaggcga

SEQ ID NO: 6320 - RNA, 21 nt, synthetic construct
  misc_feature 1..21: note = Synthetic
  source 1..21: mol_type = other RNA
ccgctgtgacacttgaacttg

SEQ ID NO: 6321 - RNA, 21 nt, synthetic construct
  misc_feature 1..21: note = Synthetic
  source 1..21: mol_type = other RNA
ccgcttcccgggttcacacca

SEQ ID NO: 6322 - RNA, 21 nt, synthetic construct
  misc_feature 1..21: note = Synthetic
  source 1..21: mol_type = other RNA
ccggacatcagtgcaacagta

SEQ ID NO: 6323 - RNA, 21 nt, synthetic construct
  misc_feature 1..21: note = Synthetic
  source 1..21: mol_type = other RNA
ccggatcacgacctgctgtgt

SEQ ID NO: 6324 - RNA, 21 nt, synthetic construct
  misc_feature 1..21: note = Synthetic
  source 1..21: mol_type = other RNA
ccggatttgcaggtgacagac

SEQ ID NO: 6325 - RNA, 21 nt, synthetic construct
  misc_feature 1..21: note = Synthetic
  source 1..21: mol_type = other RNA
ccggcagtctctagccatgtt

SEQ ID NO: 6326 - RNA, 21 nt, synthetic construct
  misc_feature 1..21: note = Synthetic
  source 1..21: mol_type = other RNA
ccggcattcattgacacgggc

SEQ ID NO: 6327 - RNA, 21 nt, synthetic construct
  misc_feature 1..21: note = Synthetic
  source 1..21: mol_type = other RNA
ccggcctcaccgtgcatgttt

SEQ ID NO: 6328 - RNA, 21 nt, synthetic construct
  misc_feature 1..21: note = Synthetic
  source 1..21: mol_type = other RNA
ccggcgaggtctcaggaaggg

SEQ ID NO: 6329 - RNA, 21 nt, synthetic construct
  misc_feature 1..21: note = Synthetic
  source 1..21: mol_type = other RNA
ccggctaattttttgtatttt

SEQ ID NO: 6330 - RNA, 21 nt, synthetic construct
  misc_feature 1..21: note = Synthetic
  source 1..21: mol_type = other RNA
ccggctgccatggatgcagtt

SEQ ID NO: 6331 - RNA, 21 nt, synthetic construct
  misc_feature 1..21: note = Synthetic
  source 1..21: mol_type = other RNA
ccgggacttgtcgtcgccttt

SEQ ID NO: 6332 - RNA, 21 nt, synthetic construct
  misc_feature 1..21: note = Synthetic
  source 1..21: mol_type = other RNA
ccgggaggtgtcgggaacagg

SEQ ID NO: 6333 - RNA, 21 nt, synthetic construct
  misc_feature 1..21: note = Synthetic
  source 1..21: mol_type = other RNA
ccgggcaggaggcctcgtctg

SEQ ID NO: 6334 - RNA, 21 nt, synthetic construct
  misc_feature 1..21: note = Synthetic
  source 1..21: mol_type = other RNA
ccgggcaggcgcaggtaaact

SEQ ID NO: 6335 - RNA, 21 nt, synthetic construct
  misc_feature 1..21: note = Synthetic
  source 1..21: mol_type = other RNA
ccgggcctgtttctcttatcc

SEQ ID NO: 6336 - RNA, 21 nt, synthetic construct
  misc_feature 1..21: note = Synthetic
  source 1..21: mol_type = other RNA
ccggggacccgggacttgtcg

SEQ ID NO: 6337 - RNA, 21 nt, synthetic construct
  misc_feature 1..21: note = Synthetic
  source 1..21: mol_type = other RNA
ccggggacttcgccaggaggg

SEQ ID NO: 6338 - RNA, 21 nt, synthetic construct
  misc_feature 1..21: note = Synthetic
  source 1..21: mol_type = other RNA
ccgggggcccctctgtgaact

SEQ ID NO: 6339 - RNA, 21 nt, synthetic construct
  misc_feature 1..21: note = Synthetic
  source 1..21: mol_type = other RNA
ccgggtgtctcaggcacttaa

SEQ ID NO: 6340 - RNA, 21 nt, synthetic construct
  misc_feature 1..21: note = Synthetic
  source 1..21: mol_type = other RNA
ccgggttcacaccattctcct

SEQ ID NO: 6341 - RNA, 21 nt, synthetic construct
  misc_feature 1..21: note = Synthetic
  source 1..21: mol_type = other RNA
ccggtcaacctgcccctctct

SEQ ID NO: 6342 - RNA, 21 nt, synthetic construct
  misc_feature 1..21: note = Synthetic
  source 1..21: mol_type = other RNA
ccggtcacactgccggctgcc

SEQ ID NO: 6343 - RNA, 21 nt, synthetic construct
  misc_feature 1..21: note = Synthetic
  source 1..21: mol_type = other RNA
ccggtccagcgtcatcttcct

SEQ ID NO: 6344 - RNA, 21 nt, synthetic construct
  misc_feature 1..21: note = Synthetic
  source 1..21: mol_type = other RNA
ccggtctgagtcacagacgaa

SEQ ID NO: 6345 - RNA, 21 nt, synthetic construct
  misc_feature 1..21: note = Synthetic
  source 1..21: mol_type = other RNA
ccggttgcccccgttgacatc

SEQ ID NO: 6346 - RNA, 21 nt, synthetic construct
  misc_feature 1..21: note = Synthetic
  source 1..21: mol_type = other RNA
ccggttggtgaagaagaggta

SEQ ID NO: 6347 - RNA, 21 nt, synthetic construct
  misc_feature 1..21: note = Synthetic
  source 1..21: mol_type = other RNA
ccgtacccagctgatttttaa

SEQ ID NO: 6348 - RNA, 21 nt, synthetic construct
  misc_feature 1..21: note = Synthetic
  source 1..21: mol_type = other RNA
ccgtcaaacgatccagactgg

SEQ ID NO: 6349 - RNA, 21 nt, synthetic construct
  misc_feature 1..21: note = Synthetic
  source 1..21: mol_type = other RNA
ccgtccaagcagtcccggtct

SEQ ID NO: 6350 - RNA, 21 nt, synthetic construct
  misc_feature 1..21: note = Synthetic
  source 1..21: mol_type = other RNA
ccgtccgggcaggcgcaggta

SEQ ID NO: 6351 - RNA, 21 nt, synthetic construct
  misc_feature 1..21: note = Synthetic
  source 1..21: mol_type = other RNA
ccgtcctggttgtggcaaatg

SEQ ID NO: 6352 - RNA, 21 nt, synthetic construct
  misc_feature 1..21: note = Synthetic
  source 1..21: mol_type = other RNA
ccgtcggggcacaggcactcg

SEQ ID NO: 6353 - RNA, 21 nt, synthetic construct
  misc_feature 1..21: note = Synthetic
  source 1..21: mol_type = other RNA
ccgtcgggggcctggatgtct

SEQ ID NO: 6354 - RNA, 21 nt, synthetic construct
  misc_feature 1..21: note = Synthetic
  source 1..21: mol_type = other RNA
ccgtcttggcactggaactcg

SEQ ID NO: 6355 - RNA, 21 nt, synthetic construct
  misc_feature 1..21: note = Synthetic
  source 1..21: mol_type = other RNA
ccgtgcatgttttaaacacat

SEQ ID NO: 6356 - RNA, 21 nt, synthetic construct
  misc_feature 1..21: note = Synthetic
  source 1..21: mol_type = other RNA
ccgtggcgatggggaggacaa

SEQ ID NO: 6357 - RNA, 21 nt, synthetic construct
  misc_feature 1..21: note = Synthetic
  source 1..21: mol_type = other RNA
ccgtgggctctgtcaagctgg

SEQ ID NO: 6358 - RNA, 21 nt, synthetic construct
  misc_feature 1..21: note = Synthetic
  source 1..21: mol_type = other RNA
ccgtggtgagcccaggggtgg

SEQ ID NO: 6359 - RNA, 21 nt, synthetic construct
  misc_feature 1..21: note = Synthetic
  source 1..21: mol_type = other RNA
ccgtgtccagagcgaccacgt

SEQ ID NO: 6360 - RNA, 21 nt, synthetic construct
  misc_feature 1..21: note = Synthetic
  source 1..21: mol_type = other RNA
ccgttctccctgaataacgtt

SEQ ID NO: 6361 - RNA, 21 nt, synthetic construct
  misc_feature 1..21: note = Synthetic
  source 1..21: mol_type = other RNA
ccgttgacatcgatgcttgag

SEQ ID NO: 6362 - RNA, 21 nt, synthetic construct
  misc_feature 1..21: note = Synthetic
  source 1..21: mol_type = other RNA
ccgttggtgccatctgctgtt

SEQ ID NO: 6363 - RNA, 21 nt, synthetic construct
  misc_feature 1..21: note = Synthetic
  source 1..21: mol_type = other RNA
ccgttgtcgcagtccacttgg

SEQ ID NO: 6364 - RNA, 21 nt, synthetic construct
  misc_feature 1..21: note = Synthetic
  source 1..21: mol_type = other RNA
ccgttgttgtccaagcattcg

SEQ ID NO: 6365 - RNA, 21 nt, synthetic construct
  misc_feature 1..21: note = Synthetic
  source 1..21: mol_type = other RNA
cctacacagggccccgagaat

SEQ ID NO: 6366 - RNA, 21 nt, synthetic construct
  misc_feature 1..21: note = Synthetic
  source 1..21: mol_type = other RNA
cctacagcgctgcggccactc

SEQ ID NO: 6367 - RNA, 21 nt, synthetic construct
  misc_feature 1..21: note = Synthetic
  source 1..21: mol_type = other RNA
cctagctggaaaccctggctt

SEQ ID NO: 6368 - RNA, 21 nt, synthetic construct
  misc_feature 1..21: note = Synthetic
  source 1..21: mol_type = other RNA
cctcaaagacggccaaggaga

SEQ ID NO: 6369 - RNA, 21 nt, synthetic construct
  misc_feature 1..21: note = Synthetic
  source 1..21: mol_type = other RNA
cctcaaatgcctgagctcaaa

SEQ ID NO: 6370 - RNA, 21 nt, synthetic construct
  misc_feature 1..21: note = Synthetic
  source 1..21: mol_type = other RNA
cctcacactggcacttgtagc

SEQ ID NO: 6371 - RNA, 21 nt, synthetic construct
  misc_feature 1..21: note = Synthetic
  source 1..21: mol_type = other RNA
cctcaccgtgcatgttttaaa

SEQ ID NO: 6372 - RNA, 21 nt, synthetic construct
  misc_feature 1..21: note = Synthetic
  source 1..21: mol_type = other RNA
cctcacgctactgggcttctt

SEQ ID NO: 6373 - RNA, 21 nt, synthetic construct
  misc_feature 1..21: note = Synthetic
  source 1..21: mol_type = other RNA
cctcacggccaaggtaaccgg

SEQ ID NO: 6374 - RNA, 21 nt, synthetic construct
  misc_feature 1..21: note = Synthetic
  source 1..21: mol_type = other RNA
cctcagcctcccaagtagctg

SEQ ID NO: 6375 - RNA, 21 nt, synthetic construct
  misc_feature 1..21: note = Synthetic
  source 1..21: mol_type = other RNA
cctcagcctcccgagtagctg

SEQ ID NO: 6376 - RNA, 21 nt, synthetic construct
  misc_feature 1..21: note = Synthetic
  source 1..21: mol_type = other RNA
cctcagcctcgccatgcctgg

SEQ ID NO: 6377 - RNA, 21 nt, synthetic construct
  misc_feature 1..21: note = Synthetic
  source 1..21: mol_type = other RNA
cctcagcctctcttggctggg

SEQ ID NO: 6378 - RNA, 21 nt, synthetic construct
  misc_feature 1..21: note = Synthetic
  source 1..21: mol_type = other RNA
cctcagcctctgtgaggcagc

SEQ ID NO: 6379 - RNA, 21 nt, synthetic construct
  misc_feature 1..21: note = Synthetic
  source 1..21: mol_type = other RNA
cctcaggttggggatgaggct

SEQ ID NO: 6380 - RNA, 21 nt, synthetic construct
  misc_feature 1..21: note = Synthetic
  source 1..21: mol_type = other RNA
cctcatcctctgtggtcttct

SEQ ID NO: 6381 - RNA, 21 nt, synthetic construct
  misc_feature 1..21: note = Synthetic
  source 1..21: mol_type = other RNA
cctcatgatccacccgcctcg

SEQ ID NO: 6382 - RNA, 21 nt, synthetic construct
  misc_feature 1..21: note = Synthetic
  source 1..21: mol_type = other RNA
cctcatgtccctggccagcag

SEQ ID NO: 6383 - RNA, 21 nt, synthetic construct
  misc_feature 1..21: note = Synthetic
  source 1..21: mol_type = other RNA
cctccaagatggtcttccggt

SEQ ID NO: 6384 - RNA, 21 nt, synthetic construct
  misc_feature 1..21: note = Synthetic
  source 1..21: mol_type = other RNA
cctccacctcctgggctcagg

SEQ ID NO: 6385 - RNA, 21 nt, synthetic construct
  misc_feature 1..21: note = Synthetic
  source 1..21: mol_type = other RNA
cctccagaactgaggaatgca

SEQ ID NO: 6386 - RNA, 21 nt, synthetic construct
  misc_feature 1..21: note = Synthetic
  source 1..21: mol_type = other RNA
cctccagactgaccatcgagg

SEQ ID NO: 6387 - RNA, 21 nt, synthetic construct
  misc_feature 1..21: note = Synthetic
  source 1..21: mol_type = other RNA
cctccagactgaccatctgtc

SEQ ID NO: 6388 - RNA, 21 nt, synthetic construct
  misc_feature 1..21: note = Synthetic
  source 1..21: mol_type = other RNA
cctccaggttcacgcagagct

SEQ ID NO: 6389 - RNA, 21 nt, synthetic construct
  misc_feature 1..21: note = Synthetic
  source 1..21: mol_type = other RNA
cctcccaaagtgctgggatta

SEQ ID NO: 6390 - RNA, 21 nt, synthetic construct
  misc_feature 1..21: note = Synthetic
  source 1..21: mol_type = other RNA
cctcccaagtagctgggatca

SEQ ID NO: 6391 - RNA, 21 nt, synthetic construct
  misc_feature 1..21: note = Synthetic
  source 1..21: mol_type = other RNA
cctcccacctcagcctcgcca

SEQ ID NO: 6392 - RNA, 21 nt, synthetic construct
  misc_feature 1..21: note = Synthetic
  source 1..21: mol_type = other RNA
cctcccagatgaataaatata

SEQ ID NO: 6393 - RNA, 21 nt, synthetic construct
  misc_feature 1..21: note = Synthetic
  source 1..21: mol_type = other RNA
cctcccctttcatcttccatg

SEQ ID NO: 6394 - RNA, 21 nt, synthetic construct
  misc_feature 1..21: note = Synthetic
  source 1..21: mol_type = other RNA
cctcccgagtagctgggacta

SEQ ID NO: 6395 - RNA, 21 nt, synthetic construct
  misc_feature 1..21: note = Synthetic
  source 1..21: mol_type = other RNA
cctccgtgtccagagcgacca

SEQ ID NO: 6396 - RNA, 21 nt, synthetic construct
  misc_feature 1..21: note = Synthetic
  source 1..21: mol_type = other RNA
cctcctgcctcagcctcccaa

SEQ ID NO: 6397 - RNA, 21 nt, synthetic construct
  misc_feature 1..21: note = Synthetic
  source 1..21: mol_type = other RNA
cctcctgggctcaggcgatcc

SEQ ID NO: 6398 - RNA, 21 nt, synthetic construct
  misc_feature 1..21: note = Synthetic
  source 1..21: mol_type = other RNA
cctcgaaagacactgggtggg

SEQ ID NO: 6399 - RNA, 21 nt, synthetic construct
  misc_feature 1..21: note = Synthetic
  source 1..21: mol_type = other RNA
cctcgcagagtgtcacattaa

SEQ ID NO: 6400 - RNA, 21 nt, synthetic construct
  misc_feature 1..21: note = Synthetic
  source 1..21: mol_type = other RNA
cctcgcagagtgtcagacagc

SEQ ID NO: 6401 - RNA, 21 nt, synthetic construct
  misc_feature 1..21: note = Synthetic
  source 1..21: mol_type = other RNA
cctcgccatgcctggccagag

SEQ ID NO: 6402 - RNA, 21 nt, synthetic construct
  misc_feature 1..21: note = Synthetic
  source 1..21: mol_type = other RNA
cctcggcctcccaaagtgctg

SEQ ID NO: 6403 - RNA, 21 nt, synthetic construct
  misc_feature 1..21: note = Synthetic
  source 1..21: mol_type = other RNA
cctcgtaaggaaccgaggcct

SEQ ID NO: 6404 - RNA, 21 nt, synthetic construct
  misc_feature 1..21: note = Synthetic
  source 1..21: mol_type = other RNA
cctcgtcagatttgtccttgc

SEQ ID NO: 6405 - RNA, 21 nt, synthetic construct
  misc_feature 1..21: note = Synthetic
  source 1..21: mol_type = other RNA
cctcgtctgagccgtccaagc

SEQ ID NO: 6406 - RNA, 21 nt, synthetic construct
  misc_feature 1..21: note = Synthetic
  source 1..21: mol_type = other RNA
cctcgtgccggttggtgaaga

SEQ ID NO: 6407 - RNA, 21 nt, synthetic construct
  misc_feature 1..21: note = Synthetic
  source 1..21: mol_type = other RNA
cctctcacaccagttcactcc

SEQ ID NO: 6408 - RNA, 21 nt, synthetic construct
  misc_feature 1..21: note = Synthetic
  source 1..21: mol_type = other RNA
cctctctgtccccggcattca

SEQ ID NO: 6409 - RNA, 21 nt, synthetic construct
  misc_feature 1..21: note = Synthetic
  source 1..21: mol_type = other RNA
cctctcttggctgggtgaggt

SEQ ID NO: 6410 - RNA, 21 nt, synthetic construct
  misc_feature 1..21: note = Synthetic
  source 1..21: mol_type = other RNA
cctctgccagcaacgtcgccc

SEQ ID NO: 6411 - RNA, 21 nt, synthetic construct
  misc_feature 1..21: note = Synthetic
  source 1..21: mol_type = other RNA
cctctgccaggcagtgtcccg

SEQ ID NO: 6412 - RNA, 21 nt, synthetic construct
  misc_feature 1..21: note = Synthetic
  source 1..21: mol_type = other RNA
cctctgggaagtggcatcatt

SEQ ID NO: 6413 - RNA, 21 nt, synthetic construct
  misc_feature 1..21: note = Synthetic
  source 1..21: mol_type = other RNA
cctctggggacagtaggtttt

SEQ ID NO: 6414 - RNA, 21 nt, synthetic construct
  misc_feature 1..21: note = Synthetic
  source 1..21: mol_type = other RNA
cctctgtgaacttgatcgggg

SEQ ID NO: 6415 - RNA, 21 nt, synthetic construct
  misc_feature 1..21: note = Synthetic
  source 1..21: mol_type = other RNA
cctctgtgaggcagctcctca

SEQ ID NO: 6416 - RNA, 21 nt, synthetic construct
  misc_feature 1..21: note = Synthetic
  source 1..21: mol_type = other RNA
cctctgtggtcttctgataga

SEQ ID NO: 6417 - RNA, 21 nt, synthetic construct
  misc_feature 1..21: note = Synthetic
  source 1..21: mol_type = other RNA
cctcttcacgcccttggtatc

SEQ ID NO: 6418 - RNA, 21 nt, synthetic construct
  misc_feature 1..21: note = Synthetic
  source 1..21: mol_type = other RNA
cctcttggctgggtgaggttg

SEQ ID NO: 6419 - RNA, 21 nt, synthetic construct
  misc_feature 1..21: note = Synthetic
  source 1..21: mol_type = other RNA
cctcttttcatcctccaagat

SEQ ID NO: 6420 - RNA, 21 nt, synthetic construct
  misc_feature 1..21: note = Synthetic
  source 1..21: mol_type = other RNA
cctgaactcaagtgatccagc

SEQ ID NO: 6421 - RNA, 21 nt, synthetic construct
  misc_feature 1..21: note = Synthetic
  source 1..21: mol_type = other RNA
cctgaagtcccgtcaaacgat

SEQ ID NO: 6422 - RNA, 21 nt, synthetic construct
  misc_feature 1..21: note = Synthetic
  source 1..21: mol_type = other RNA
cctgaataacgttttcctctt

SEQ ID NO: 6423 - RNA, 21 nt, synthetic construct
  misc_feature 1..21: note = Synthetic
  source 1..21: mol_type = other RNA
cctgacactcatcgatatcgc

SEQ ID NO: 6424 - RNA, 21 nt, synthetic construct
  misc_feature 1..21: note = Synthetic
  source 1..21: mol_type = other RNA
cctgacactcatcgatatctt

SEQ ID NO: 6425 - RNA, 21 nt, synthetic construct
  misc_feature 1..21: note = Synthetic
  source 1..21: mol_type = other RNA
cctgacagccacacctgggtg

SEQ ID NO: 6426 - RNA, 21 nt, synthetic construct
  misc_feature 1..21: note = Synthetic
  source 1..21: mol_type = other RNA
cctgacatcccctcccctttc

SEQ ID NO: 6427 - RNA, 21 nt, synthetic construct
  misc_feature 1..21: note = Synthetic
  source 1..21: mol_type = other RNA
cctgacctcatgatccacccg

SEQ ID NO: 6428 - RNA, 21 nt, synthetic construct
  misc_feature 1..21: note = Synthetic
  source 1..21: mol_type = other RNA
cctgacctcgtgccggttggt

SEQ ID NO: 6429 - RNA, 21 nt, synthetic construct
  misc_feature 1..21: note = Synthetic
  source 1..21: mol_type = other RNA
cctgacggtggatgtctcctg

SEQ ID NO: 6430 - RNA, 21 nt, synthetic construct
  misc_feature 1..21: note = Synthetic
  source 1..21: mol_type = other RNA
cctgagctcaaaccatcctcc

SEQ ID NO: 6431 - RNA, 21 nt, synthetic construct
  misc_feature 1..21: note = Synthetic
  source 1..21: mol_type = other RNA
cctgagtttaggggtttggct

SEQ ID NO: 6432 - RNA, 21 nt, synthetic construct
  misc_feature 1..21: note = Synthetic
  source 1..21: mol_type = other RNA
cctgcactgggggggacacag

SEQ ID NO: 6433 - RNA, 21 nt, synthetic construct
  misc_feature 1..21: note = Synthetic
  source 1..21: mol_type = other RNA
cctgcccctctctgtccccgg

SEQ ID NO: 6434 - RNA, 21 nt, synthetic construct
  misc_feature 1..21: note = Synthetic
  source 1..21: mol_type = other RNA
cctgcctcagcctcccaagta

SEQ ID NO: 6435 - RNA, 21 nt, synthetic construct
  misc_feature 1..21: note = Synthetic
  source 1..21: mol_type = other RNA
cctgcctcagcctcccgagta

SEQ ID NO: 6436 - RNA, 21 nt, synthetic construct
  misc_feature 1..21: note = Synthetic
  source 1..21: mol_type = other RNA
cctgctgtgtcctagctggaa

SEQ ID NO: 6437 - RNA, 21 nt, synthetic construct
  misc_feature 1..21: note = Synthetic
  source 1..21: mol_type = other RNA
cctggagagaaatggaggtgt

SEQ ID NO: 6438 - RNA, 21 nt, synthetic construct
  misc_feature 1..21: note = Synthetic
  source 1..21: mol_type = other RNA
cctggatgtctctgctgatga

SEQ ID NO: 6439 - RNA, 21 nt, synthetic construct
  misc_feature 1..21: note = Synthetic
  source 1..21: mol_type = other RNA
cctggcactcagcgctgccat

SEQ ID NO: 6440 - RNA, 21 nt, synthetic construct
  misc_feature 1..21: note = Synthetic
  source 1..21: mol_type = other RNA
cctggccagaggccatgggct

SEQ ID NO: 6441 - RNA, 21 nt, synthetic construct
  misc_feature 1..21: note = Synthetic
  source 1..21: mol_type = other RNA
cctggccagcagcatgccgtc

SEQ ID NO: 6442 - RNA, 21 nt, synthetic construct
  misc_feature 1..21: note = Synthetic
  source 1..21: mol_type = other RNA
cctggcctgggatcccatccc

SEQ ID NO: 6443 - RNA, 21 nt, synthetic construct
  misc_feature 1..21: note = Synthetic
  source 1..21: mol_type = other RNA
cctggctgtctagcaaggctt

SEQ ID NO: 6444 - RNA, 21 nt, synthetic construct
  misc_feature 1..21: note = Synthetic
  source 1..21: mol_type = other RNA
cctggcttaaggaaggtacaa

SEQ ID NO: 6445 - RNA, 21 nt, synthetic construct
  misc_feature 1..21: note = Synthetic
  source 1..21: mol_type = other RNA
cctggcttcccgcgattgcac

SEQ ID NO: 6446 - RNA, 21 nt, synthetic construct
  misc_feature 1..21: note = Synthetic
  source 1..21: mol_type = other RNA
cctgggactcatcagagccat

SEQ ID NO: 6447 - RNA, 21 nt, synthetic construct
  misc_feature 1..21: note = Synthetic
  source 1..21: mol_type = other RNA
cctgggagcacgtcttggggg

SEQ ID NO: 6448 - RNA, 21 nt, synthetic construct
  misc_feature 1..21: note = Synthetic
  source 1..21: mol_type = other RNA
cctgggatcccatcccaacac

SEQ ID NO: 6449 - RNA, 21 nt, synthetic construct
  misc_feature 1..21: note = Synthetic
  source 1..21: mol_type = other RNA
cctgggctcaggcgatcctcc

SEQ ID NO: 6450 - RNA, 21 nt, synthetic construct
  misc_feature 1..21: note = Synthetic
  source 1..21: mol_type = other RNA
cctggggacaattgccaatcc

SEQ ID NO: 6451 - RNA, 21 nt, synthetic construct
  misc_feature 1..21: note = Synthetic
  source 1..21: mol_type = other RNA
cctgggtgcaggccacgtgtc

SEQ ID NO: 6452 - RNA, 21 nt, synthetic construct
  misc_feature 1..21: note = Synthetic
  source 1..21: mol_type = other RNA
cctgggtggccactgcagcct

SEQ ID NO: 6453 - RNA, 21 nt, synthetic construct
  misc_feature 1..21: note = Synthetic
  source 1..21: mol_type = other RNA
cctggtccccccgggcctgtt

SEQ ID NO: 6454 - RNA, 21 nt, synthetic construct
  misc_feature 1..21: note = Synthetic
  source 1..21: mol_type = other RNA
cctggtctccaactcctgaac

SEQ ID NO: 6455 - RNA, 21 nt, synthetic construct
  misc_feature 1..21: note = Synthetic
  source 1..21: mol_type = other RNA
cctggttgtggcaaatgtgga

SEQ ID NO: 6456 - RNA, 21 nt, synthetic construct
  misc_feature 1..21: note = Synthetic
  source 1..21: mol_type = other RNA
cctgtgaggcggttggcactg

SEQ ID NO: 6457 - RNA, 21 nt, synthetic construct
  misc_feature 1..21: note = Synthetic
  source 1..21: mol_type = other RNA
cctgtgtctggccaaattcat

SEQ ID NO: 6458 - RNA, 21 nt, synthetic construct
  misc_feature 1..21: note = Synthetic
  source 1..21: mol_type = other RNA
cctgttctgcctcccagatga

SEQ ID NO: 6459 - RNA, 21 nt, synthetic construct
  misc_feature 1..21: note = Synthetic
  source 1..21: mol_type = other RNA
cctgtttctcttatccttcac

SEQ ID NO: 6460 - RNA, 21 nt, synthetic construct
  misc_feature 1..21: note = Synthetic
  source 1..21: mol_type = other RNA
ccttacggctgtggagctgac

SEQ ID NO: 6461 - RNA, 21 nt, synthetic construct
  misc_feature 1..21: note = Synthetic
  source 1..21: mol_type = other RNA
ccttcacgaggaaaggaagaa

SEQ ID NO: 6462 - RNA, 21 nt, synthetic construct
  misc_feature 1..21: note = Synthetic
  source 1..21: mol_type = other RNA
ccttcctcacactggcacttg

SEQ ID NO: 6463 - RNA, 21 nt, synthetic construct
  misc_feature 1..21: note = Synthetic
  source 1..21: mol_type = other RNA
ccttcgtgtgggggtccagct

SEQ ID NO: 6464 - RNA, 21 nt, synthetic construct
  misc_feature 1..21: note = Synthetic
  source 1..21: mol_type = other RNA
ccttctatacagtggtttaaa

SEQ ID NO: 6465 - RNA, 21 nt, synthetic construct
  misc_feature 1..21: note = Synthetic
  source 1..21: mol_type = other RNA
ccttgagggtggccgggggcc

SEQ ID NO: 6466 - RNA, 21 nt, synthetic construct
  misc_feature 1..21: note = Synthetic
  source 1..21: mol_type = other RNA
ccttgcaggccttcgtgtggg

SEQ ID NO: 6467 - RNA, 21 nt, synthetic construct
  misc_feature 1..21: note = Synthetic
  source 1..21: mol_type = other RNA
ccttgcagtcatattcccggt

SEQ ID NO: 6468 - RNA, 21 nt, synthetic construct
  misc_feature 1..21: note = Synthetic
  source 1..21: mol_type = other RNA
ccttgcagtcggggccaccat

SEQ ID NO: 6469 - RNA, 21 nt, synthetic construct
  misc_feature 1..21: note = Synthetic
  source 1..21: mol_type = other RNA
ccttgctcgtctgagccgttg

SEQ ID NO: 6470 - RNA, 21 nt, synthetic construct
  misc_feature 1..21: note = Synthetic
  source 1..21: mol_type = other RNA
ccttggaacacgtaaagaccc

SEQ ID NO: 6471 - RNA, 21 nt, synthetic construct
  misc_feature 1..21: note = Synthetic
  source 1..21: mol_type = other RNA
ccttggcttggagccgttctc

SEQ ID NO: 6472 - RNA, 21 nt, synthetic construct
  misc_feature 1..21: note = Synthetic
  source 1..21: mol_type = other RNA
ccttggtatccgcaacagaga

SEQ ID NO: 6473 - RNA, 21 nt, synthetic construct
  misc_feature 1..21: note = Synthetic
  source 1..21: mol_type = other RNA
ccttgtgacatcttcacgcgg

SEQ ID NO: 6474 - RNA, 21 nt, synthetic construct
  misc_feature 1..21: note = Synthetic
  source 1..21: mol_type = other RNA
cctttagcctgacggtggatg

SEQ ID NO: 6475 - RNA, 21 nt, synthetic construct
  misc_feature 1..21: note = Synthetic
  source 1..21: mol_type = other RNA
cctttcatcttccatgtttga

SEQ ID NO: 6476 - RNA, 21 nt, synthetic construct
  misc_feature 1..21: note = Synthetic
  source 1..21: mol_type = other RNA
cctttcctggcttaaggaagg

SEQ ID NO: 6477 - RNA, 21 nt, synthetic construct
  misc_feature 1..21: note = Synthetic
  source 1..21: mol_type = other RNA
cctttcttgatcttggcggga

SEQ ID NO: 6478 - RNA, 21 nt, synthetic construct
  misc_feature 1..21: note = Synthetic
  source 1..21: mol_type = other RNA
cctttgtgacaggaaccgcgg

SEQ ID NO: 6479 - RNA, 21 nt, synthetic construct
  misc_feature 1..21: note = Synthetic
  source 1..21: mol_type = other RNA
cgaaaccagaaaggcttatca

SEQ ID NO: 6480 - RNA, 21 nt, synthetic construct
  misc_feature 1..21: note = Synthetic
  source 1..21: mol_type = other RNA
cgaaactcgtcctgggagcac

SEQ ID NO: 6481 - RNA, 21 nt, synthetic construct
  misc_feature 1..21: note = Synthetic
  source 1..21: mol_type = other RNA
cgaaagacactgggtgggtca

SEQ ID NO: 6482 - RNA, 21 nt, synthetic construct
  misc_feature 1..21: note = Synthetic
  source 1..21: mol_type = other RNA
cgaactgccgagagatgcact

SEQ ID NO: 6483 - RNA, 21 nt, synthetic construct
  misc_feature 1..21: note = Synthetic
  source 1..21: mol_type = other RNA
cgaagcctgttctgcctccca

SEQ ID NO: 6484 - RNA, 21 nt, synthetic construct
  misc_feature 1..21: note = Synthetic
  source 1..21: mol_type = other RNA
cgaaggccgagcaggggctac

SEQ ID NO: 6485 - RNA, 21 nt, synthetic construct
  misc_feature 1..21: note = Synthetic
  source 1..21: mol_type = other RNA
cgacaagattggggaagtgaa

SEQ ID NO: 6486 - RNA, 21 nt, synthetic construct
  misc_feature 1..21: note = Synthetic
  source 1..21: mol_type = other RNA
cgacaatggcagttctcgata

SEQ ID NO: 6487 - RNA, 21 nt, synthetic construct
  misc_feature 1..21: note = Synthetic
  source 1..21: mol_type = other RNA
cgacagaaaacagtgcaaaat

SEQ ID NO: 6488 - RNA, 21 nt, synthetic construct
  misc_feature 1..21: note = Synthetic
  source 1..21: mol_type = other RNA
cgacagcctcaaatgcctgag

SEQ ID NO: 6489 - RNA, 21 nt, synthetic construct
  misc_feature 1..21: note = Synthetic
  source 1..21: mol_type = other RNA
cgacaggtggccacagcgcag

SEQ ID NO: 6490 - RNA, 21 nt, synthetic construct
  misc_feature 1..21: note = Synthetic
  source 1..21: mol_type = other RNA
cgacaggtggccacaggacag

SEQ ID NO: 6491 - RNA, 21 nt, synthetic construct
  misc_feature 1..21: note = Synthetic
  source 1..21: mol_type = other RNA
cgaccacgttcctcaggttgg

SEQ ID NO: 6492 - RNA, 21 nt, synthetic construct
  misc_feature 1..21: note = Synthetic
  source 1..21: mol_type = other RNA
cgacccggatcacgacctgct

SEQ ID NO: 6493 - RNA, 21 nt, synthetic construct
  misc_feature 1..21: note = Synthetic
  source 1..21: mol_type = other RNA
cgacctgctgtgtcctagctg

SEQ ID NO: 6494 - RNA, 21 nt, synthetic construct
  misc_feature 1..21: note = Synthetic
  source 1..21: mol_type = other RNA
cgacgccatgaatccctttcc

SEQ ID NO: 6495 - RNA, 21 nt, synthetic construct
  misc_feature 1..21: note = Synthetic
  source 1..21: mol_type = other RNA
cgacggtccagcgcaatttcc

SEQ ID NO: 6496 - RNA, 21 nt, synthetic construct
  misc_feature 1..21: note = Synthetic
  source 1..21: mol_type = other RNA
cgactcgtgtatgtcgcggag

SEQ ID NO: 6497 - RNA, 21 nt, synthetic construct
  misc_feature 1..21: note = Synthetic
  source 1..21: mol_type = other RNA
cgagaatagtcactgaacaaa

SEQ ID NO: 6498 - RNA, 21 nt, synthetic construct
  misc_feature 1..21: note = Synthetic
  source 1..21: mol_type = other RNA
cgagaccagagacccagctcc

SEQ ID NO: 6499 - RNA, 21 nt, synthetic construct
  misc_feature 1..21: note = Synthetic
  source 1..21: mol_type = other RNA
cgagagatgcacttcccatcg

SEQ ID NO: 6500 - RNA, 21 nt, synthetic construct
  misc_feature 1..21: note = Synthetic
  source 1..21: mol_type = other RNA
cgagcaggggctactgtcccc

SEQ ID NO: 6501 - RNA, 21 nt, synthetic construct
  misc_feature 1..21: note = Synthetic
  source 1..21: mol_type = other RNA
cgagccatcttcgcagtcggg

SEQ ID NO: 6502 - RNA, 21 nt, synthetic construct
  misc_feature 1..21: note = Synthetic
  source 1..21: mol_type = other RNA
cgaggaaaggaagaaaccaaa

SEQ ID NO: 6503 - RNA, 21 nt, synthetic construct
  misc_feature 1..21: note = Synthetic
  source 1..21: mol_type = other RNA
cgaggagcaaggcgacggtcc

SEQ ID NO: 6504 - RNA, 21 nt, synthetic construct
  misc_feature 1..21: note = Synthetic
  source 1..21: mol_type = other RNA
cgaggagcacgatggggagga

SEQ ID NO: 6505 - RNA, 21 nt, synthetic construct
  misc_feature 1..21: note = Synthetic
  source 1..21: mol_type = other RNA
cgaggagcactgtagggagag

SEQ ID NO: 6506 - RNA, 21 nt, synthetic construct
  misc_feature 1..21: note = Synthetic
  source 1..21: mol_type = other RNA
cgaggccttgagggtggccgg

SEQ ID NO: 6507 - RNA, 21 nt, synthetic construct
  misc_feature 1..21: note = Synthetic
  source 1..21: mol_type = other RNA
cgagggcgccccccaggacaa

SEQ ID NO: 6508 - RNA, 21 nt, synthetic construct
  misc_feature 1..21: note = Synthetic
  source 1..21: mol_type = other RNA
cgaggggtagctgtagccgtc

SEQ ID NO: 6509 - RNA, 21 nt, synthetic construct
  misc_feature 1..21: note = Synthetic
  source 1..21: mol_type = other RNA
cgaggtctcaggaagggttct

SEQ ID NO: 6510 - RNA, 21 nt, synthetic construct
  misc_feature 1..21: note = Synthetic
  source 1..21: mol_type = other RNA
cgagtagatgtccacaccatt

SEQ ID NO: 6511 - RNA, 21 nt, synthetic construct
  misc_feature 1..21: note = Synthetic
  source 1..21: mol_type = other RNA
cgagtagctgggactacaggt

SEQ ID NO: 6512 - RNA, 21 nt, synthetic construct
  misc_feature 1..21: note = Synthetic
  source 1..21: mol_type = other RNA
cgagtgggggttgatctgcgg

SEQ ID NO: 6513 - RNA, 21 nt, synthetic construct
  misc_feature 1..21: note = Synthetic
  source 1..21: mol_type = other RNA
cgatatcgcactctttgatgg

SEQ ID NO: 6514 - RNA, 21 nt, synthetic construct
  misc_feature 1..21: note = Synthetic
  source 1..21: mol_type = other RNA
cgatatcttcgcatcttcgct

SEQ ID NO: 6515 - RNA, 21 nt, synthetic construct
  misc_feature 1..21: note = Synthetic
  source 1..21: mol_type = other RNA
cgatattcacgatcacggctt

SEQ ID NO: 6516 - RNA, 21 nt, synthetic construct
  misc_feature 1..21: note = Synthetic
  source 1..21: mol_type = other RNA
cgatcacggctttgaagtccc

SEQ ID NO: 6517 - RNA, 21 nt, synthetic construct
  misc_feature 1..21: note = Synthetic
  source 1..21: mol_type = other RNA
cgatcatggctcactgcaacc

SEQ ID NO: 6518 - RNA, 21 nt, synthetic construct
  misc_feature 1..21: note = Synthetic
  source 1..21: mol_type = other RNA
cgatccagactggaggattta

SEQ ID NO: 6519 - RNA, 21 nt, synthetic construct
  misc_feature 1..21: note = Synthetic
  source 1..21: mol_type = other RNA
cgatcctcctgcctcagcctc

SEQ ID NO: 6520 - RNA, 21 nt, synthetic construct
  misc_feature 1..21: note = Synthetic
  source 1..21: mol_type = other RNA
cgatctcctgacctcatgatc

SEQ ID NO: 6521 - RNA, 21 nt, synthetic construct
  misc_feature 1..21: note = Synthetic
  source 1..21: mol_type = other RNA
cgatcttaaggtcattgcaga

SEQ ID NO: 6522 - RNA, 21 nt, synthetic construct
  misc_feature 1..21: note = Synthetic
  source 1..21: mol_type = other RNA
cgatgcttgagatggagtgaa

SEQ ID NO: 6523 - RNA, 21 nt, synthetic construct
  misc_feature 1..21: note = Synthetic
  source 1..21: mol_type = other RNA
cgatggagcccacagccttgc

SEQ ID NO: 6524 - RNA, 21 nt, synthetic construct
  misc_feature 1..21: note = Synthetic
  source 1..21: mol_type = other RNA
cgatggcccttggcttggagc

SEQ ID NO: 6525 - RNA, 21 nt, synthetic construct
  misc_feature 1..21: note = Synthetic
  source 1..21: mol_type = other RNA
cgatggggaggacaatggaca

SEQ ID NO: 6526 - RNA, 21 nt, synthetic construct
  misc_feature 1..21: note = Synthetic
  source 1..21: mol_type = other RNA
cgatttcagaaagaacctgaa

SEQ ID NO: 6527 - RNA, 21 nt, synthetic construct
  misc_feature 1..21: note = Synthetic
  source 1..21: mol_type = other RNA
cgcaacagagacagtgcccag

SEQ ID NO: 6528 - RNA, 21 nt, synthetic construct
  misc_feature 1..21: note = Synthetic
  source 1..21: mol_type = other RNA
cgcaatctcggctcactgcaa

SEQ ID NO: 6529 - RNA, 21 nt, synthetic construct
  misc_feature 1..21: note = Synthetic
  source 1..21: mol_type = other RNA
cgcaatttccagccccagggc

SEQ ID NO: 6530 - RNA, 21 nt, synthetic construct
  misc_feature 1..21: note = Synthetic
  source 1..21: mol_type = other RNA
cgcacctccagaactgaggaa

SEQ ID NO: 6531 - RNA, 21 nt, synthetic construct
  misc_feature 1..21: note = Synthetic
  source 1..21: mol_type = other RNA
cgcactctttgatgggttcat

SEQ ID NO: 6532 - RNA, 21 nt, synthetic construct
  misc_feature 1..21: note = Synthetic
  source 1..21: mol_type = other RNA
cgcagacccacttgtaggaga

SEQ ID NO: 6533 - RNA, 21 nt, synthetic construct
  misc_feature 1..21: note = Synthetic
  source 1..21: mol_type = other RNA
cgcagagctggctgcaggtgt

SEQ ID NO: 6534 - RNA, 21 nt, synthetic construct
  misc_feature 1..21: note = Synthetic
  source 1..21: mol_type = other RNA
cgcagagtgtcacattaacgc

SEQ ID NO: 6535 - RNA, 21 nt, synthetic construct
  misc_feature 1..21: note = Synthetic
  source 1..21: mol_type = other RNA
cgcagagtgtcagacagcctt

SEQ ID NO: 6536 - RNA, 21 nt, synthetic construct
  misc_feature 1..21: note = Synthetic
  source 1..21: mol_type = other RNA
cgcagccaacttcatcgctca

SEQ ID NO: 6537 - RNA, 21 nt, synthetic construct
  misc_feature 1..21: note = Synthetic
  source 1..21: mol_type = other RNA
cgcagcctctgccaggcagtg

SEQ ID NO: 6538 - RNA, 21 nt, synthetic construct
  misc_feature 1..21: note = Synthetic
  source 1..21: mol_type = other RNA
cgcaggcccacagctggggga

SEQ ID NO: 6539 - RNA, 21 nt, synthetic construct
  misc_feature 1..21: note = Synthetic
  source 1..21: mol_type = other RNA
cgcaggtaaacttgggcgagt

SEQ ID NO: 6540 - RNA, 21 nt, synthetic construct
  misc_feature 1..21: note = Synthetic
  source 1..21: mol_type = other RNA
cgcagtccacttggccatcgc

SEQ ID NO: 6541 - RNA, 21 nt, synthetic construct
  misc_feature 1..21: note = Synthetic
  source 1..21: mol_type = other RNA
cgcagtcggggtcgttgtcgc

SEQ ID NO: 6542 - RNA, 21 nt, synthetic construct
  misc_feature 1..21: note = Synthetic
  source 1..21: mol_type = other RNA
cgcagttttcctcgtcagatt

SEQ ID NO: 6543 - RNA, 21 nt, synthetic construct
  misc_feature 1..21: note = Synthetic
  source 1..21: mol_type = other RNA
cgcatctgtcgcccacgtggc

SEQ ID NO: 6544 - RNA, 21 nt, synthetic construct
  misc_feature 1..21: note = Synthetic
  source 1..21: mol_type = other RNA
cgcatctgtcgcccactgcag

SEQ ID NO: 6545 - RNA, 21 nt, synthetic construct
  misc_feature 1..21: note = Synthetic
  source 1..21: mol_type = other RNA
cgcatcttcgctgggccacca

SEQ ID NO: 6546 - RNA, 21 nt, synthetic construct
  misc_feature 1..21: note = Synthetic
  source 1..21: mol_type = other RNA
cgcatttacgtgctccgaaac

SEQ ID NO: 6547 - RNA, 21 nt, synthetic construct
  misc_feature 1..21: note = Synthetic
  source 1..21: mol_type = other RNA
cgccacagagcacagcggaaa

SEQ ID NO: 6548 - RNA, 21 nt, synthetic construct
  misc_feature 1..21: note = Synthetic
  source 1..21: mol_type = other RNA
cgccaccacgcccggctaatt

SEQ ID NO: 6549 - RNA, 21 nt, synthetic construct
  misc_feature 1..21: note = Synthetic
  source 1..21: mol_type = other RNA
cgccacgtcatcctccagact

SEQ ID NO: 6550 - RNA, 21 nt, synthetic construct
  misc_feature 1..21: note = Synthetic
  source 1..21: mol_type = other RNA
cgccacttaggcagtggaact

SEQ ID NO: 6551 - RNA, 21 nt, synthetic construct
  misc_feature 1..21: note = Synthetic
  source 1..21: mol_type = other RNA
cgccagctggagtggatgcac

SEQ ID NO: 6552 - RNA, 21 nt, synthetic construct
  misc_feature 1..21: note = Synthetic
  source 1..21: mol_type = other RNA
cgccaggagggcccaggataa

SEQ ID NO: 6553 - RNA, 21 nt, synthetic construct
  misc_feature 1..21: note = Synthetic
  source 1..21: mol_type = other RNA
cgccagttcttccatagaagg

SEQ ID NO: 6554 - RNA, 21 nt, synthetic construct
  misc_feature 1..21: note = Synthetic
  source 1..21: mol_type = other RNA
cgccatgaatccctttcctgg

SEQ ID NO: 6555 - RNA, 21 nt, synthetic construct
  misc_feature 1..21: note = Synthetic
  source 1..21: mol_type = other RNA
cgccatgcctggccagaggcc

SEQ ID NO: 6556 - RNA, 21 nt, synthetic construct
  misc_feature 1..21: note = Synthetic
  source 1..21: mol_type = other RNA
cgccattgctcagggtggtcc

SEQ ID NO: 6557 - RNA, 21 nt, synthetic construct
  misc_feature 1..21: note = Synthetic
  source 1..21: mol_type = other RNA
cgcccacgtggctgaagatct

SEQ ID NO: 6558 - RNA, 21 nt, synthetic construct
  misc_feature 1..21: note = Synthetic
  source 1..21: mol_type = other RNA
cgcccactgcagtccccgccg

SEQ ID NO: 6559 - RNA, 21 nt, synthetic construct
  misc_feature 1..21: note = Synthetic
  source 1..21: mol_type = other RNA
cgcccagagcttggtgagaca

SEQ ID NO: 6560 - RNA, 21 nt, synthetic construct
  misc_feature 1..21: note = Synthetic
  source 1..21: mol_type = other RNA
cgcccaggccagactgcggac

SEQ ID NO: 6561 - RNA, 21 nt, synthetic construct
  misc_feature 1..21: note = Synthetic
  source 1..21: mol_type = other RNA
cgccccccaggacaaggtggg

SEQ ID NO: 6562 - RNA, 21 nt, synthetic construct
  misc_feature 1..21: note = Synthetic
  source 1..21: mol_type = other RNA
cgcccggcctcaccgtgcatg

SEQ ID NO: 6563 - RNA, 21 nt, synthetic construct
  misc_feature 1..21: note = Synthetic
  source 1..21: mol_type = other RNA
cgcccggctaattttttgtat

SEQ ID NO: 6564 - RNA, 21 nt, synthetic construct
  misc_feature 1..21: note = Synthetic
  source 1..21: mol_type = other RNA
cgcccttggtatccgcaacag

SEQ ID NO: 6565 - RNA, 21 nt, synthetic construct
  misc_feature 1..21: note = Synthetic
  source 1..21: mol_type = other RNA
cgccgcggcgaggagcaaggc

SEQ ID NO: 6566 - RNA, 21 nt, synthetic construct
  misc_feature 1..21: note = Synthetic
  source 1..21: mol_type = other RNA
cgccgctgtgacacttgaact

SEQ ID NO: 6567 - RNA, 21 nt, synthetic construct
  misc_feature 1..21: note = Synthetic
  source 1..21: mol_type = other RNA
cgccgtgggctctgtcaagct

SEQ ID NO: 6568 - RNA, 21 nt, synthetic construct
  misc_feature 1..21: note = Synthetic
  source 1..21: mol_type = other RNA
cgccgttgttgtccaagcatt

SEQ ID NO: 6569 - RNA, 21 nt, synthetic construct
  misc_feature 1..21: note = Synthetic
  source 1..21: mol_type = other RNA
cgcctcggcctcccaaagtgc

SEQ ID NO: 6570 - RNA, 21 nt, synthetic construct
  misc_feature 1..21: note = Synthetic
  source 1..21: mol_type = other RNA
cgcctttgtgacaggaaccgc

SEQ ID NO: 6571 - RNA, 21 nt, synthetic construct
  misc_feature 1..21: note = Synthetic
  source 1..21: mol_type = other RNA
cgcggaggaacgccaggcctc

SEQ ID NO: 6572 - RNA, 21 nt, synthetic construct
  misc_feature 1..21: note = Synthetic
  source 1..21: mol_type = other RNA
cgcggaggcggctccggggac

SEQ ID NO: 6573 - RNA, 21 nt, synthetic construct
  misc_feature 1..21: note = Synthetic
  source 1..21: mol_type = other RNA
cgcggcgaggagcaaggcgac

SEQ ID NO: 6574 - RNA, 21 nt, synthetic construct
  misc_feature 1..21: note = Synthetic
  source 1..21: mol_type = other RNA
cgcgggagtctgacggaggct

SEQ ID NO: 6575 - RNA, 21 nt, synthetic construct
  misc_feature 1..21: note = Synthetic
  source 1..21: mol_type = other RNA
cgctactgggcttcttctcat

SEQ ID NO: 6576 - RNA, 21 nt, synthetic construct
  misc_feature 1..21: note = Synthetic
  source 1..21: mol_type = other RNA
cgctcatgtccttgcagtcat

SEQ ID NO: 6577 - RNA, 21 nt, synthetic construct
  misc_feature 1..21: note = Synthetic
  source 1..21: mol_type = other RNA
cgctccggtccagcgtcatct

SEQ ID NO: 6578 - RNA, 21 nt, synthetic construct
  misc_feature 1..21: note = Synthetic
  source 1..21: mol_type = other RNA
cgctctgtcacacagctgccc

SEQ ID NO: 6579 - RNA, 21 nt, synthetic construct
  misc_feature 1..21: note = Synthetic
  source 1..21: mol_type = other RNA
cgctctgtcgcccaggccaga

SEQ ID NO: 6580 - RNA, 21 nt, synthetic construct
  misc_feature 1..21: note = Synthetic
  source 1..21: mol_type = other RNA
cgctgccatcgcagacccact

SEQ ID NO: 6581 - RNA, 21 nt, synthetic construct
  misc_feature 1..21: note = Synthetic
  source 1..21: mol_type = other RNA
cgctgcggccactcatccgag

SEQ ID NO: 6582 - RNA, 21 nt, synthetic construct
  misc_feature 1..21: note = Synthetic
  source 1..21: mol_type = other RNA
cgctgggccaccagctggaag

SEQ ID NO: 6583 - RNA, 21 nt, synthetic construct
  misc_feature 1..21: note = Synthetic
  source 1..21: mol_type = other RNA
cgctgtgacacttgaacttgt

SEQ ID NO: 6584 - RNA, 21 nt, synthetic construct
  misc_feature 1..21: note = Synthetic
  source 1..21: mol_type = other RNA
cgcttcccgggttcacaccat

SEQ ID NO: 6585 - RNA, 21 nt, synthetic construct
  misc_feature 1..21: note = Synthetic
  source 1..21: mol_type = other RNA
cgctttgttgctcaggcctgg

SEQ ID NO: 6586 - RNA, 21 nt, synthetic construct
  misc_feature 1..21: note = Synthetic
  source 1..21: mol_type = other RNA
cggaaaccggggacttcgcca

SEQ ID NO: 6587 - RNA, 21 nt, synthetic construct
  misc_feature 1..21: note = Synthetic
  source 1..21: mol_type = other RNA
cggaacctgtgaggcggttgg

SEQ ID NO: 6588 - RNA, 21 nt, synthetic construct
  misc_feature 1..21: note = Synthetic
  source 1..21: mol_type = other RNA
cggacataaagacgacaatgg

SEQ ID NO: 6589 - RNA, 21 nt, synthetic construct
  misc_feature 1..21: note = Synthetic
  source 1..21: mol_type = other RNA
cggacatcagtgcaacagtaa

SEQ ID NO: 6590 - RNA, 21 nt, synthetic construct
  misc_feature 1..21: note = Synthetic
  source 1..21: mol_type = other RNA
cggactgcagtggcgcaatct

SEQ ID NO: 6591 - RNA, 21 nt, synthetic construct
  misc_feature 1..21: note = Synthetic
  source 1..21: mol_type = other RNA
cggaggaacgccaggcctccc

SEQ ID NO: 6592 - RNA, 21 nt, synthetic construct
  misc_feature 1..21: note = Synthetic
  source 1..21: mol_type = other RNA
cggaggcggctccggggaccc

SEQ ID NO: 6593 - RNA, 21 nt, synthetic construct
  misc_feature 1..21: note = Synthetic
  source 1..21: mol_type = other RNA
cggaggctgtcactgtctctc

SEQ ID NO: 6594 - RNA, 21 nt, synthetic construct
  misc_feature 1..21: note = Synthetic
  source 1..21: mol_type = other RNA
cggagggcgactcgtgtatgt

SEQ ID NO: 6595 - RNA, 21 nt, synthetic construct
  misc_feature 1..21: note = Synthetic
  source 1..21: mol_type = other RNA
cggaggtgtcgccacagagca

SEQ ID NO: 6596 - RNA, 21 nt, synthetic construct
  misc_feature 1..21: note = Synthetic
  source 1..21: mol_type = other RNA
cggagtctcgctctgtcgccc

SEQ ID NO: 6597 - RNA, 21 nt, synthetic construct
  misc_feature 1..21: note = Synthetic
  source 1..21: mol_type = other RNA
cggatcacgacctgctgtgtc

SEQ ID NO: 6598 - RNA, 21 nt, synthetic construct
  misc_feature 1..21: note = Synthetic
  source 1..21: mol_type = other RNA
cggattcagccagatcatttc

SEQ ID NO: 6599 - RNA, 21 nt, synthetic construct
  misc_feature 1..21: note = Synthetic
  source 1..21: mol_type = other RNA
cggatttgcaggtgacagaca

SEQ ID NO: 6600 - RNA, 21 nt, synthetic construct
  misc_feature 1..21: note = Synthetic
  source 1..21: mol_type = other RNA
cggcagtctctagccatgttg

SEQ ID NO: 6601 - RNA, 21 nt, synthetic construct
  misc_feature 1..21: note = Synthetic
  source 1..21: mol_type = other RNA
cggcattcattgacacgggct

SEQ ID NO: 6602 - RNA, 21 nt, synthetic construct
  misc_feature 1..21: note = Synthetic
  source 1..21: mol_type = other RNA
cggccaaggagaaggggtggg

SEQ ID NO: 6603 - RNA, 21 nt, synthetic construct
  misc_feature 1..21: note = Synthetic
  source 1..21: mol_type = other RNA
cggccaaggtaaccgggtgtc

SEQ ID NO: 6604 - RNA, 21 nt, synthetic construct
  misc_feature 1..21: note = Synthetic
  source 1..21: mol_type = other RNA
cggccactcatccgagccatc

SEQ ID NO: 6605 - RNA, 21 nt, synthetic construct
  misc_feature 1..21: note = Synthetic
  source 1..21: mol_type = other RNA
cggccactgaggagatctagg

SEQ ID NO: 6606 - RNA, 21 nt, synthetic construct
  misc_feature 1..21: note = Synthetic
  source 1..21: mol_type = other RNA
cggcccccacagctgaagtcc

SEQ ID NO: 6607 - RNA, 21 nt, synthetic construct
  misc_feature 1..21: note = Synthetic
  source 1..21: mol_type = other RNA
cggcctcaccgtgcatgtttt

SEQ ID NO: 6608 - RNA, 21 nt, synthetic construct
  misc_feature 1..21: note = Synthetic
  source 1..21: mol_type = other RNA
cggcctcccaaagtgctggga

SEQ ID NO: 6609 - RNA, 21 nt, synthetic construct
  misc_feature 1..21: note = Synthetic
  source 1..21: mol_type = other RNA
cggcgaggagcaaggcgacgg

SEQ ID NO: 6610 - RNA, 21 nt, synthetic construct
  misc_feature 1..21: note = Synthetic
  source 1..21: mol_type = other RNA
cggcgaggtctcaggaagggt

SEQ ID NO: 6611 - RNA, 21 nt, synthetic construct
  misc_feature 1..21: note = Synthetic
  source 1..21: mol_type = other RNA
cggcgatttcagaaagaacct

SEQ ID NO: 6612 - RNA, 21 nt, synthetic construct
  misc_feature 1..21: note = Synthetic
  source 1..21: mol_type = other RNA
cggctaattttttgtattttt

SEQ ID NO: 6613 - RNA, 21 nt, synthetic construct
  misc_feature 1..21: note = Synthetic
  source 1..21: mol_type = other RNA
cggctcactgcaagctccgct

SEQ ID NO: 6614 - RNA, 21 nt, synthetic construct
  misc_feature 1..21: note = Synthetic
  source 1..21: mol_type = other RNA
cggctccggggacccgggact

SEQ ID NO: 6615 - RNA, 21 nt, synthetic construct
  misc_feature 1..21: note = Synthetic
  source 1..21: mol_type = other RNA
cggctgcagaccaaggagggg

SEQ ID NO: 6616 - RNA, 21 nt, synthetic construct
  misc_feature 1..21: note = Synthetic
  source 1..21: mol_type = other RNA
cggctgccatggatgcagttt

SEQ ID NO: 6617 - RNA, 21 nt, synthetic construct
  misc_feature 1..21: note = Synthetic
  source 1..21: mol_type = other RNA
cggctgtggagctgaccttta

SEQ ID NO: 6618 - RNA, 21 nt, synthetic construct
  misc_feature 1..21: note = Synthetic
  source 1..21: mol_type = other RNA
cggctttgaagtcccggtcaa

SEQ ID NO: 6619 - RNA, 21 nt, synthetic construct
  misc_feature 1..21: note = Synthetic
  source 1..21: mol_type = other RNA
cgggaacaggtcgggtggttg

SEQ ID NO: 6620 - RNA, 21 nt, synthetic construct
  misc_feature 1..21: note = Synthetic
  source 1..21: mol_type = other RNA
cgggaatggaagtgggtaggg

SEQ ID NO: 6621 - RNA, 21 nt, synthetic construct
  misc_feature 1..21: note = Synthetic
  source 1..21: mol_type = other RNA
cgggaccacaggtgagcaccg

SEQ ID NO: 6622 - RNA, 21 nt, synthetic construct
  misc_feature 1..21: note = Synthetic
  source 1..21: mol_type = other RNA
cgggactccaggcagatgttc

SEQ ID NO: 6623 - RNA, 21 nt, synthetic construct
  misc_feature 1..21: note = Synthetic
  source 1..21: mol_type = other RNA
cgggacttgtcgtcgcctttg

SEQ ID NO: 6624 - RNA, 21 nt, synthetic construct
  misc_feature 1..21: note = Synthetic
  source 1..21: mol_type = other RNA
cgggaggatgggcaccaggct

SEQ ID NO: 6625 - RNA, 21 nt, synthetic construct
  misc_feature 1..21: note = Synthetic
  source 1..21: mol_type = other RNA
cgggaggtgtcgggaacaggt

SEQ ID NO: 6626 - RNA, 21 nt, synthetic construct
  misc_feature 1..21: note = Synthetic
  source 1..21: mol_type = other RNA
cgggagtctgacggaggctgt

SEQ ID NO: 6627 - RNA, 21 nt, synthetic construct
  misc_feature 1..21: note = Synthetic
  source 1..21: mol_type = other RNA
cgggagttccccagtcagtcc

SEQ ID NO: 6628 - RNA, 21 nt, synthetic construct
  misc_feature 1..21: note = Synthetic
  source 1..21: mol_type = other RNA
cgggatcctgacactcatcga

SEQ ID NO: 6629 - RNA, 21 nt, synthetic construct
  misc_feature 1..21: note = Synthetic
  source 1..21: mol_type = other RNA
cgggcaggaggcctcgtctga

SEQ ID NO: 6630 - RNA, 21 nt, synthetic construct
  misc_feature 1..21: note = Synthetic
  source 1..21: mol_type = other RNA
cgggcaggcgcaggtaaactt

SEQ ID NO: 6631 - RNA, 21 nt, synthetic construct
  misc_feature 1..21: note = Synthetic
  source 1..21: mol_type = other RNA
cgggcctgtttctcttatcct

SEQ ID NO: 6632 - RNA, 21 nt, synthetic construct
  misc_feature 1..21: note = Synthetic
  source 1..21: mol_type = other RNA
cgggctttccctggcctggga

SEQ ID NO: 6633 - RNA, 21 nt, synthetic construct
  misc_feature 1..21: note = Synthetic
  source 1..21: mol_type = other RNA
cggggacatcattctcccaaa

SEQ ID NO: 6634 - RNA, 21 nt, synthetic construct
  misc_feature 1..21: note = Synthetic
  source 1..21: mol_type = other RNA
cggggacccgggacttgtcgt

SEQ ID NO: 6635 - RNA, 21 nt, synthetic construct
  misc_feature 1..21: note = Synthetic
  source 1..21: mol_type = other RNA
cggggacttcgccaggagggc

SEQ ID NO: 6636 - RNA, 21 nt, synthetic construct
  misc_feature 1..21: note = Synthetic
  source 1..21: mol_type = other RNA
cggggagattctgaggcaacg

SEQ ID NO: 6637 - RNA, 21 nt, synthetic construct
  misc_feature 1..21: note = Synthetic
  source 1..21: mol_type = other RNA
cggggcacaggcactcgtagc

SEQ ID NO: 6638 - RNA, 21 nt, synthetic construct
  misc_feature 1..21: note = Synthetic
  source 1..21: mol_type = other RNA
cggggcagggaggcacagata

SEQ ID NO: 6639 - RNA, 21 nt, synthetic construct
  misc_feature 1..21: note = Synthetic
  source 1..21: mol_type = other RNA
cggggccaccatcacagcgcc

SEQ ID NO: 6640 - RNA, 21 nt, synthetic construct
  misc_feature 1..21: note = Synthetic
  source 1..21: mol_type = other RNA
cggggctggtggggcgagggc

SEQ ID NO: 6641 - RNA, 21 nt, synthetic construct
  misc_feature 1..21: note = Synthetic
  source 1..21: mol_type = other RNA
cgggggcccctctgtgaactt

SEQ ID NO: 6642 - RNA, 21 nt, synthetic construct
  misc_feature 1..21: note = Synthetic
  source 1..21: mol_type = other RNA
cgggggcctggatgtctctgc

SEQ ID NO: 6643 - RNA, 21 nt, synthetic construct
  misc_feature 1..21: note = Synthetic
  source 1..21: mol_type = other RNA
cgggggtgacagggcaaaggc

SEQ ID NO: 6644 - RNA, 21 nt, synthetic construct
  misc_feature 1..21: note = Synthetic
  source 1..21: mol_type = other RNA
cggggtcgttgtcgcaggccc

SEQ ID NO: 6645 - RNA, 21 nt, synthetic construct
  misc_feature 1..21: note = Synthetic
  source 1..21: mol_type = other RNA
cggggttgtcaaagttgatgc

SEQ ID NO: 6646 - RNA, 21 nt, synthetic construct
  misc_feature 1..21: note = Synthetic
  source 1..21: mol_type = other RNA
cggggtttcacgtgttagcca

SEQ ID NO: 6647 - RNA, 21 nt, synthetic construct
  misc_feature 1..21: note = Synthetic
  source 1..21: mol_type = other RNA
cgggtggttgtgtgctgtgtc

SEQ ID NO: 6648 - RNA, 21 nt, synthetic construct
  misc_feature 1..21: note = Synthetic
  source 1..21: mol_type = other RNA
cgggtgtctcaggcacttaat

SEQ ID NO: 6649 - RNA, 21 nt, synthetic construct
  misc_feature 1..21: note = Synthetic
  source 1..21: mol_type = other RNA
cgggttcacaccattctcctg

SEQ ID NO: 6650 - RNA, 21 nt, synthetic construct
  misc_feature 1..21: note = Synthetic
  source 1..21: mol_type = other RNA
cggtcaacctgcccctctctg

SEQ ID NO: 6651 - RNA, 21 nt, synthetic construct
  misc_feature 1..21: note = Synthetic
  source 1..21: mol_type = other RNA
cggtcacactgccggctgcca

SEQ ID NO: 6652 - RNA, 21 nt, synthetic construct
  misc_feature 1..21: note = Synthetic
  source 1..21: mol_type = other RNA
cggtccagcgcaatttccagc

SEQ ID NO: 6653 - RNA, 21 nt, synthetic construct
  misc_feature 1..21: note = Synthetic
  source 1..21: mol_type = other RNA
cggtccagcgtcatcttcctg

SEQ ID NO: 6654 - RNA, 21 nt, synthetic construct
  misc_feature 1..21: note = Synthetic
  source 1..21: mol_type = other RNA
cggtccagtagatgttgctgt

SEQ ID NO: 6655 - RNA, 21 nt, synthetic construct
  misc_feature 1..21: note = Synthetic
  source 1..21: mol_type = other RNA
cggtctgagtcacagacgaac

SEQ ID NO: 6656 - RNA, 21 nt, synthetic construct
  misc_feature 1..21: note = Synthetic
  source 1..21: mol_type = other RNA
cggtgccaccacggattcagc

SEQ ID NO: 6657 - RNA, 21 nt, synthetic construct
  misc_feature 1..21: note = Synthetic
  source 1..21: mol_type = other RNA
cggtggagagaaactcaaaac

SEQ ID NO: 6658 - RNA, 21 nt, synthetic construct
  misc_feature 1..21: note = Synthetic
  source 1..21: mol_type = other RNA
cggtggatgtctcctgggtgg

SEQ ID NO: 6659 - RNA, 21 nt, synthetic construct
  misc_feature 1..21: note = Synthetic
  source 1..21: mol_type = other RNA
cggtgtcataggaagagacgc

SEQ ID NO: 6660 - RNA, 21 nt, synthetic construct
  misc_feature 1..21: note = Synthetic
  source 1..21: mol_type = other RNA
cggttccctgcactggggggg

SEQ ID NO: 6661 - RNA, 21 nt, synthetic construct
  misc_feature 1..21: note = Synthetic
  source 1..21: mol_type = other RNA
cggttgacacggcccccacag

SEQ ID NO: 6662 - RNA, 21 nt, synthetic construct
  misc_feature 1..21: note = Synthetic
  source 1..21: mol_type = other RNA
cggttgcccccgttgacatcg

SEQ ID NO: 6663 - RNA, 21 nt, synthetic construct
  misc_feature 1..21: note = Synthetic
  source 1..21: mol_type = other RNA
cggttggcactgaaaatggct

SEQ ID NO: 6664 - RNA, 21 nt, synthetic construct
  misc_feature 1..21: note = Synthetic
  source 1..21: mol_type = other RNA
cggttggtgaagaagaggtag

SEQ ID NO: 6665 - RNA, 21 nt, synthetic construct
  misc_feature 1..21: note = Synthetic
  source 1..21: mol_type = other RNA
cgtaaagacccctacagcgct

SEQ ID NO: 6666 - RNA, 21 nt, synthetic construct
  misc_feature 1..21: note = Synthetic
  source 1..21: mol_type = other RNA
cgtaaggaaccgaggccttga

SEQ ID NO: 6667 - RNA, 21 nt, synthetic construct
  misc_feature 1..21: note = Synthetic
  source 1..21: mol_type = other RNA
cgtacccagctgatttttaac

SEQ ID NO: 6668 - RNA, 21 nt, synthetic construct
  misc_feature 1..21: note = Synthetic
  source 1..21: mol_type = other RNA
cgtagccgatcttaaggtcat

SEQ ID NO: 6669 - RNA, 21 nt, synthetic construct
  misc_feature 1..21: note = Synthetic
  source 1..21: mol_type = other RNA
cgtcaaacgatccagactgga

SEQ ID NO: 6670 - RNA, 21 nt, synthetic construct
  misc_feature 1..21: note = Synthetic
  source 1..21: mol_type = other RNA
cgtcagatttgtccttgcagt

SEQ ID NO: 6671 - RNA, 21 nt, synthetic construct
  misc_feature 1..21: note = Synthetic
  source 1..21: mol_type = other RNA
cgtcagggcgacaggtggcca

SEQ ID NO: 6672 - RNA, 21 nt, synthetic construct
  misc_feature 1..21: note = Synthetic
  source 1..21: mol_type = other RNA
cgtcatcctccagactgacca

SEQ ID NO: 6673 - RNA, 21 nt, synthetic construct
  misc_feature 1..21: note = Synthetic
  source 1..21: mol_type = other RNA
cgtcatcttcctgacctcgtg

SEQ ID NO: 6674 - RNA, 21 nt, synthetic construct
  misc_feature 1..21: note = Synthetic
  source 1..21: mol_type = other RNA
cgtccaagcagtcccggtctg

SEQ ID NO: 6675 - RNA, 21 nt, synthetic construct
  misc_feature 1..21: note = Synthetic
  source 1..21: mol_type = other RNA
cgtccgggcaggcgcaggtaa

SEQ ID NO: 6676 - RNA, 21 nt, synthetic construct
  misc_feature 1..21: note = Synthetic
  source 1..21: mol_type = other RNA
cgtcctgggagcacgtcttgg

SEQ ID NO: 6677 - RNA, 21 nt, synthetic construct
  misc_feature 1..21: note = Synthetic
  source 1..21: mol_type = other RNA
cgtcctggttgtggcaaatgt

SEQ ID NO: 6678 - RNA, 21 nt, synthetic construct
  misc_feature 1..21: note = Synthetic
  source 1..21: mol_type = other RNA
cgtcgcccagagcttggtgag

SEQ ID NO: 6679 - RNA, 21 nt, synthetic construct
  misc_feature 1..21: note = Synthetic
  source 1..21: mol_type = other RNA
cgtcgcctttgtgacaggaac

SEQ ID NO: 6680 - RNA, 21 nt, synthetic construct
  misc_feature 1..21: note = Synthetic
  source 1..21: mol_type = other RNA
cgtcggggcacaggcactcgt

SEQ ID NO: 6681 - RNA, 21 nt, synthetic construct
  misc_feature 1..21: note = Synthetic
  source 1..21: mol_type = other RNA
cgtcgggggcctggatgtctc

SEQ ID NO: 6682 - RNA, 21 nt, synthetic construct
  misc_feature 1..21: note = Synthetic
  source 1..21: mol_type = other RNA
cgtctcctgggactcatcaga

SEQ ID NO: 6683 - RNA, 21 nt, synthetic construct
  misc_feature 1..21: note = Synthetic
  source 1..21: mol_type = other RNA
cgtctgagccgtccaagcagt

SEQ ID NO: 6684 - RNA, 21 nt, synthetic construct
  misc_feature 1..21: note = Synthetic
  source 1..21: mol_type = other RNA
cgtctgagccgttgtcgcagt

SEQ ID NO: 6685 - RNA, 21 nt, synthetic construct
  misc_feature 1..21: note = Synthetic
  source 1..21: mol_type = other RNA
cgtcttggcactggaactcgt

SEQ ID NO: 6686 - RNA, 21 nt, synthetic construct
  misc_feature 1..21: note = Synthetic
  source 1..21: mol_type = other RNA
cgtcttgggggagcacgtctc

SEQ ID NO: 6687 - RNA, 21 nt, synthetic construct
  misc_feature 1..21: note = Synthetic
  source 1..21: mol_type = other RNA
cgtcttggggggacagccttg

SEQ ID NO: 6688 - RNA, 21 nt, synthetic construct
  misc_feature 1..21: note = Synthetic
  source 1..21: mol_type = other RNA
cgtgagccactgcgcccggcc

SEQ ID NO: 6689 - RNA, 21 nt, synthetic construct
  misc_feature 1..21: note = Synthetic
  source 1..21: mol_type = other RNA
cgtgaggcacctgtgtctggc

SEQ ID NO: 6690 - RNA, 21 nt, synthetic construct
  misc_feature 1..21: note = Synthetic
  source 1..21: mol_type = other RNA
cgtgcaaataatctttgtaca

SEQ ID NO: 6691 - RNA, 21 nt, synthetic construct
  misc_feature 1..21: note = Synthetic
  source 1..21: mol_type = other RNA
cgtgcatgttttaaacacata

SEQ ID NO: 6692 - RNA, 21 nt, synthetic construct
  misc_feature 1..21: note = Synthetic
  source 1..21: mol_type = other RNA
cgtgccaccgtacccagctga

SEQ ID NO: 6693 - RNA, 21 nt, synthetic construct
  misc_feature 1..21: note = Synthetic
  source 1..21: mol_type = other RNA
cgtgccggttggtgaagaaga

SEQ ID NO: 6694 - RNA, 21 nt, synthetic construct
  misc_feature 1..21: note = Synthetic
  source 1..21: mol_type = other RNA
cgtgctccgaaaccagaaagg

SEQ ID NO: 6695 - RNA, 21 nt, synthetic construct
  misc_feature 1..21: note = Synthetic
  source 1..21: mol_type = other RNA
cgtggcagcgaaactcgtcct

SEQ ID NO: 6696 - RNA, 21 nt, synthetic construct
  misc_feature 1..21: note = Synthetic
  source 1..21: mol_type = other RNA
cgtggcgatggggaggacaat

SEQ ID NO: 6697 - RNA, 21 nt, synthetic construct
  misc_feature 1..21: note = Synthetic
  source 1..21: mol_type = other RNA
cgtggctgaagatctcggctg

SEQ ID NO: 6698 - RNA, 21 nt, synthetic construct
  misc_feature 1..21: note = Synthetic
  source 1..21: mol_type = other RNA
cgtgggaacagccgccgttgt

SEQ ID NO: 6699 - RNA, 21 nt, synthetic construct
  misc_feature 1..21: note = Synthetic
  source 1..21: mol_type = other RNA
cgtgggctctgtcaagctggg

SEQ ID NO: 6700 - RNA, 21 nt, synthetic construct
  misc_feature 1..21: note = Synthetic
  source 1..21: mol_type = other RNA
cgtggtgagcccaggggtggc

SEQ ID NO: 6701 - RNA, 21 nt, synthetic construct
  misc_feature 1..21: note = Synthetic
  source 1..21: mol_type = other RNA
cgtgtatgtcgcggaggcggc

SEQ ID NO: 6702 - RNA, 21 nt, synthetic construct
  misc_feature 1..21: note = Synthetic
  source 1..21: mol_type = other RNA
cgtgtccagagcgaccacgtt

SEQ ID NO: 6703 - RNA, 21 nt, synthetic construct
  misc_feature 1..21: note = Synthetic
  source 1..21: mol_type = other RNA
cgtgtcctcacggccaaggta

SEQ ID NO: 6704 - RNA, 21 nt, synthetic construct
  misc_feature 1..21: note = Synthetic
  source 1..21: mol_type = other RNA
cgtgtgggggtccagctggaa

SEQ ID NO: 6705 - RNA, 21 nt, synthetic construct
  misc_feature 1..21: note = Synthetic
  source 1..21: mol_type = other RNA
cgtgttagccaggatggtctc

SEQ ID NO: 6706 - RNA, 21 nt, synthetic construct
  misc_feature 1..21: note = Synthetic
  source 1..21: mol_type = other RNA
cgttcctcaggttggggatga

SEQ ID NO: 6707 - RNA, 21 nt, synthetic construct
  misc_feature 1..21: note = Synthetic
  source 1..21: mol_type = other RNA
cgttctccctgaataacgttt

SEQ ID NO: 6708 - RNA, 21 nt, synthetic construct
  misc_feature 1..21: note = Synthetic
  source 1..21: mol_type = other RNA
cgttgacatcgatgcttgaga

SEQ ID NO: 6709 - RNA, 21 nt, synthetic construct
  misc_feature 1..21: note = Synthetic
  source 1..21: mol_type = other RNA
cgttgactcctgagtttaggg

SEQ ID NO: 6710 - RNA, 21 nt, synthetic construct
  misc_feature 1..21: note = Synthetic
  source 1..21: mol_type = other RNA
cgttgatgatatctgtccaaa

SEQ ID NO: 6711 - RNA, 21 nt, synthetic construct
  misc_feature 1..21: note = Synthetic
  source 1..21: mol_type = other RNA
cgttgcacacagtccagttcg

SEQ ID NO: 6712 - RNA, 21 nt, synthetic construct
  misc_feature 1..21: note = Synthetic
  source 1..21: mol_type = other RNA
cgttggtcccgcactctttga

SEQ ID NO: 6713 - RNA, 21 nt, synthetic construct
  misc_feature 1..21: note = Synthetic
  source 1..21: mol_type = other RNA
cgttggtgccatctgctgttg

SEQ ID NO: 6714 - RNA, 21 nt, synthetic construct
  misc_feature 1..21: note = Synthetic
  source 1..21: mol_type = other RNA
cgttgtcgcaggcccacagct

SEQ ID NO: 6715 - RNA, 21 nt, synthetic construct
  misc_feature 1..21: note = Synthetic
  source 1..21: mol_type = other RNA
cgttgtcgcagtccacttggc

SEQ ID NO: 6716 - RNA, 21 nt, synthetic construct
  misc_feature 1..21: note = Synthetic
  source 1..21: mol_type = other RNA
cgttgttgtccaagcattcgt

SEQ ID NO: 6717 - RNA, 21 nt, synthetic construct
  misc_feature 1..21: note = Synthetic
  source 1..21: mol_type = other RNA
cgtttcaacctcgtaaggaac

SEQ ID NO: 6718 - RNA, 21 nt, synthetic construct
  misc_feature 1..21: note = Synthetic
  source 1..21: mol_type = other RNA
cgtttctttcgcatctgtcgc

SEQ ID NO: 6719 - RNA, 21 nt, synthetic construct
  misc_feature 1..21: note = Synthetic
  source 1..21: mol_type = other RNA
cgttttcctcttcacgccctt

SEQ ID NO: 6720 - RNA, 21 nt, synthetic construct
  misc_feature 1..21: note = Synthetic
  source 1..21: mol_type = other RNA
ctaacctggctgtctagcaag

SEQ ID NO: 6721 - RNA, 21 nt, synthetic construct
  misc_feature 1..21: note = Synthetic
  source 1..21: mol_type = other RNA
ctaattttttgtatttttagt

SEQ ID NO: 6722 - RNA, 21 nt, synthetic construct
  misc_feature 1..21: note = Synthetic
  source 1..21: mol_type = other RNA
ctacaaaaaccttctatacag

SEQ ID NO: 6723 - RNA, 21 nt, synthetic construct
  misc_feature 1..21: note = Synthetic
  source 1..21: mol_type = other RNA
ctacacagggccccgagaata

SEQ ID NO: 6724 - RNA, 21 nt, synthetic construct
  misc_feature 1..21: note = Synthetic
  source 1..21: mol_type = other RNA
ctacagcgctgcggccactca

SEQ ID NO: 6725 - RNA, 21 nt, synthetic construct
  misc_feature 1..21: note = Synthetic
  source 1..21: mol_type = other RNA
ctacaggtgcccgccaccacg

SEQ ID NO: 6726 - RNA, 21 nt, synthetic construct
  misc_feature 1..21: note = Synthetic
  source 1..21: mol_type = other RNA
ctactgggcttcttctcattt

SEQ ID NO: 6727 - RNA, 21 nt, synthetic construct
  misc_feature 1..21: note = Synthetic
  source 1..21: mol_type = other RNA
ctactgtccccttggaacacg

SEQ ID NO: 6728 - RNA, 21 nt, synthetic construct
  misc_feature 1..21: note = Synthetic
  source 1..21: mol_type = other RNA
ctagcaaggcttgcatagaag

SEQ ID NO: 6729 - RNA, 21 nt, synthetic construct
  misc_feature 1..21: note = Synthetic
  source 1..21: mol_type = other RNA
ctagccatgttgcagactttg

SEQ ID NO: 6730 - RNA, 21 nt, synthetic construct
  misc_feature 1..21: note = Synthetic
  source 1..21: mol_type = other RNA
ctagctggaaaccctggcttc

SEQ ID NO: 6731 - RNA, 21 nt, synthetic construct
  misc_feature 1..21: note = Synthetic
  source 1..21: mol_type = other RNA
ctagggtgatgccattgggcc

SEQ ID NO: 6732 - RNA, 21 nt, synthetic construct
  misc_feature 1..21: note = Synthetic
  source 1..21: mol_type = other RNA
ctaggtgggcggacataaaga

SEQ ID NO: 6733 - RNA, 21 nt, synthetic construct
  misc_feature 1..21: note = Synthetic
  source 1..21: mol_type = other RNA
ctatacagtggtttaaaaagt

SEQ ID NO: 6734 - RNA, 21 nt, synthetic construct
  misc_feature 1..21: note = Synthetic
  source 1..21: mol_type = other RNA
ctatctccaccgtggtgagcc

SEQ ID NO: 6735 - RNA, 21 nt, synthetic construct
  misc_feature 1..21: note = Synthetic
  source 1..21: mol_type = other RNA
ctatctgtacagggacgcatt

SEQ ID NO: 6736 - RNA, 21 nt, synthetic construct
  misc_feature 1..21: note = Synthetic
  source 1..21: mol_type = other RNA
ctatgttgcccaggctggaaa

SEQ ID NO: 6737 - RNA, 21 nt, synthetic construct
  misc_feature 1..21: note = Synthetic
  source 1..21: mol_type = other RNA
ctattgctggccacctccgtg

SEQ ID NO: 6738 - RNA, 21 nt, synthetic construct
  misc_feature 1..21: note = Synthetic
  source 1..21: mol_type = other RNA
ctcaaaacttcctggagagaa

SEQ ID NO: 6739 - RNA, 21 nt, synthetic construct
  misc_feature 1..21: note = Synthetic
  source 1..21: mol_type = other RNA
ctcaaaccatcctcccacctc

SEQ ID NO: 6740 - RNA, 21 nt, synthetic construct
  misc_feature 1..21: note = Synthetic
  source 1..21: mol_type = other RNA
ctcaaagacggccaaggagaa

SEQ ID NO: 6741 - RNA, 21 nt, synthetic construct
  misc_feature 1..21: note = Synthetic
  source 1..21: mol_type = other RNA
ctcaaatgcctgagctcaaac

SEQ ID NO: 6742 - RNA, 21 nt, synthetic construct
  misc_feature 1..21: note = Synthetic
  source 1..21: mol_type = other RNA
ctcaagtgatccagctcagcc

SEQ ID NO: 6743 - RNA, 21 nt, synthetic construct
  misc_feature 1..21: note = Synthetic
  source 1..21: mol_type = other RNA
ctcacaccagttcactcctct

SEQ ID NO: 6744 - RNA, 21 nt, synthetic construct
  misc_feature 1..21: note = Synthetic
  source 1..21: mol_type = other RNA
ctcacactggcacttgtagcc

SEQ ID NO: 6745 - RNA, 21 nt, synthetic construct
  misc_feature 1..21: note = Synthetic
  source 1..21: mol_type = other RNA
ctcaccgtgcatgttttaaac

SEQ ID NO: 6746 - RNA, 21 nt, synthetic construct
  misc_feature 1..21: note = Synthetic
  source 1..21: mol_type = other RNA
ctcacgacagcctcaaatgcc

SEQ ID NO: 6747 - RNA, 21 nt, synthetic construct
  misc_feature 1..21: note = Synthetic
  source 1..21: mol_type = other RNA
ctcacgctactgggcttcttc

SEQ ID NO: 6748 - RNA, 21 nt, synthetic construct
  misc_feature 1..21: note = Synthetic
  source 1..21: mol_type = other RNA
ctcacggccaaggtaaccggg

SEQ ID NO: 6749 - RNA, 21 nt, synthetic construct
  misc_feature 1..21: note = Synthetic
  source 1..21: mol_type = other RNA
ctcactgcaacctccacctcc

SEQ ID NO: 6750 - RNA, 21 nt, synthetic construct
  misc_feature 1..21: note = Synthetic
  source 1..21: mol_type = other RNA
ctcactgcaagctccgcttcc

SEQ ID NO: 6751 - RNA, 21 nt, synthetic construct
  misc_feature 1..21: note = Synthetic
  source 1..21: mol_type = other RNA
ctcagcctcccaaagtgctgg

SEQ ID NO: 6752 - RNA, 21 nt, synthetic construct
  misc_feature 1..21: note = Synthetic
  source 1..21: mol_type = other RNA
ctcagcctcccaagtagctgg

SEQ ID NO: 6753 - RNA, 21 nt, synthetic construct
  misc_feature 1..21: note = Synthetic
  source 1..21: mol_type = other RNA
ctcagcctcccgagtagctgg

SEQ ID NO: 6754 - RNA, 21 nt, synthetic construct
  misc_feature 1..21: note = Synthetic
  source 1..21: mol_type = other RNA
ctcagcctcgccatgcctggc

SEQ ID NO: 6755 - RNA, 21 nt, synthetic construct
  misc_feature 1..21: note = Synthetic
  source 1..21: mol_type = other RNA
ctcagcctctcttggctgggt

SEQ ID NO: 6756 - RNA, 21 nt, synthetic construct
  misc_feature 1..21: note = Synthetic
  source 1..21: mol_type = other RNA
ctcagcctctgtgaggcagct

SEQ ID NO: 6757 - RNA, 21 nt, synthetic construct
  misc_feature 1..21: note = Synthetic
  source 1..21: mol_type = other RNA
ctcagcgctgccatcgcagac

SEQ ID NO: 6758 - RNA, 21 nt, synthetic construct
  misc_feature 1..21: note = Synthetic
  source 1..21: mol_type = other RNA
ctcaggaagggttctgggcag

SEQ ID NO: 6759 - RNA, 21 nt, synthetic construct
  misc_feature 1..21: note = Synthetic
  source 1..21: mol_type = other RNA
ctcaggcacttaataaatatt

SEQ ID NO: 6760 - RNA, 21 nt, synthetic construct
  misc_feature 1..21: note = Synthetic
  source 1..21: mol_type = other RNA
ctcaggcctggtctccaactc

SEQ ID NO: 6761 - RNA, 21 nt, synthetic construct
  misc_feature 1..21: note = Synthetic
  source 1..21: mol_type = other RNA
ctcaggcgatcctcctgcctc

SEQ ID NO: 6762 - RNA, 21 nt, synthetic construct
  misc_feature 1..21: note = Synthetic
  source 1..21: mol_type = other RNA
ctcaggctctgcctctgggaa

SEQ ID NO: 6763 - RNA, 21 nt, synthetic construct
  misc_feature 1..21: note = Synthetic
  source 1..21: mol_type = other RNA
ctcagggtggtcctctcacac

SEQ ID NO: 6764 - RNA, 21 nt, synthetic construct
  misc_feature 1..21: note = Synthetic
  source 1..21: mol_type = other RNA
ctcaggttggggatgaggctg

SEQ ID NO: 6765 - RNA, 21 nt, synthetic construct
  misc_feature 1..21: note = Synthetic
  source 1..21: mol_type = other RNA
ctcatacatacaacggggaca

SEQ ID NO: 6766 - RNA, 21 nt, synthetic construct
  misc_feature 1..21: note = Synthetic
  source 1..21: mol_type = other RNA
ctcatcagagccatcctggca

SEQ ID NO: 6767 - RNA, 21 nt, synthetic construct
  misc_feature 1..21: note = Synthetic
  source 1..21: mol_type = other RNA
ctcatccgagccatcttcgca

SEQ ID NO: 6768 - RNA, 21 nt, synthetic construct
  misc_feature 1..21: note = Synthetic
  source 1..21: mol_type = other RNA
ctcatcctctgtggtcttctg

SEQ ID NO: 6769 - RNA, 21 nt, synthetic construct
  misc_feature 1..21: note = Synthetic
  source 1..21: mol_type = other RNA
ctcatcgatatcgcactcttt

SEQ ID NO: 6770 - RNA, 21 nt, synthetic construct
  misc_feature 1..21: note = Synthetic
  source 1..21: mol_type = other RNA
ctcatcgatatcttcgcatct

SEQ ID NO: 6771 - RNA, 21 nt, synthetic construct
  misc_feature 1..21: note = Synthetic
  source 1..21: mol_type = other RNA
ctcatgatccacccgcctcgg

SEQ ID NO: 6772 - RNA, 21 nt, synthetic construct
  misc_feature 1..21: note = Synthetic
  source 1..21: mol_type = other RNA
ctcatgtccctggccagcagc

SEQ ID NO: 6773 - RNA, 21 nt, synthetic construct
  misc_feature 1..21: note = Synthetic
  source 1..21: mol_type = other RNA
ctcatgtccttgcagtcatat

SEQ ID NO: 6774 - RNA, 21 nt, synthetic construct
  misc_feature 1..21: note = Synthetic
  source 1..21: mol_type = other RNA
ctcatttcctctgccagcaac

SEQ ID NO: 6775 - RNA, 21 nt, synthetic construct
  misc_feature 1..21: note = Synthetic
  source 1..21: mol_type = other RNA
ctccaactcctgaactcaagt

SEQ ID NO: 6776 - RNA, 21 nt, synthetic construct
  misc_feature 1..21: note = Synthetic
  source 1..21: mol_type = other RNA
ctccaagatggtcttccggtt

SEQ ID NO: 6777 - RNA, 21 nt, synthetic construct
  misc_feature 1..21: note = Synthetic
  source 1..21: mol_type = other RNA
ctccaccgtggtgagcccagg

SEQ ID NO: 6778 - RNA, 21 nt, synthetic construct
  misc_feature 1..21: note = Synthetic
  source 1..21: mol_type = other RNA
ctccacctcctgggctcaggc

SEQ ID NO: 6779 - RNA, 21 nt, synthetic construct
  misc_feature 1..21: note = Synthetic
  source 1..21: mol_type = other RNA
ctccagaactgaggaatgcag

SEQ ID NO: 6780 - RNA, 21 nt, synthetic construct
  misc_feature 1..21: note = Synthetic
  source 1..21: mol_type = other RNA
ctccagactgaccatcgaggg

SEQ ID NO: 6781 - RNA, 21 nt, synthetic construct
  misc_feature 1..21: note = Synthetic
  source 1..21: mol_type = other RNA
ctccagactgaccatctgtct

SEQ ID NO: 6782 - RNA, 21 nt, synthetic construct
  misc_feature 1..21: note = Synthetic
  source 1..21: mol_type = other RNA
ctccaggcagatgttcacgcc

SEQ ID NO: 6783 - RNA, 21 nt, synthetic construct
  misc_feature 1..21: note = Synthetic
  source 1..21: mol_type = other RNA
ctccaggttcacgcagagctg

SEQ ID NO: 6784 - RNA, 21 nt, synthetic construct
  misc_feature 1..21: note = Synthetic
  source 1..21: mol_type = other RNA
ctcccaaaaagcgttgcacac

SEQ ID NO: 6785 - RNA, 21 nt, synthetic construct
  misc_feature 1..21: note = Synthetic
  source 1..21: mol_type = other RNA
ctcccaaagtgctgggattac

SEQ ID NO: 6786 - RNA, 21 nt, synthetic construct
  misc_feature 1..21: note = Synthetic
  source 1..21: mol_type = other RNA
ctcccaagtagctgggatcac

SEQ ID NO: 6787 - RNA, 21 nt, synthetic construct
  misc_feature 1..21: note = Synthetic
  source 1..21: mol_type = other RNA
ctcccacctcagcctcgccat

SEQ ID NO: 6788 - RNA, 21 nt, synthetic construct
  misc_feature 1..21: note = Synthetic
  source 1..21: mol_type = other RNA
ctcccagaagccactcataca

SEQ ID NO: 6789 - RNA, 21 nt, synthetic construct
  misc_feature 1..21: note = Synthetic
  source 1..21: mol_type = other RNA
ctcccagatgaataaatatat

SEQ ID NO: 6790 - RNA, 21 nt, synthetic construct
  misc_feature 1..21: note = Synthetic
  source 1..21: mol_type = other RNA
ctcccctttcatcttccatgt

SEQ ID NO: 6791 - RNA, 21 nt, synthetic construct
  misc_feature 1..21: note = Synthetic
  source 1..21: mol_type = other RNA
ctcccgagtagctgggactac

SEQ ID NO: 6792 - RNA, 21 nt, synthetic construct
  misc_feature 1..21: note = Synthetic
  source 1..21: mol_type = other RNA
ctccctgaataacgttttcct

SEQ ID NO: 6793 - RNA, 21 nt, synthetic construct
  misc_feature 1..21: note = Synthetic
  source 1..21: mol_type = other RNA
ctccgaaaccagaaaggctta

SEQ ID NO: 6794 - RNA, 21 nt, synthetic construct
  misc_feature 1..21: note = Synthetic
  source 1..21: mol_type = other RNA
ctccgcttcccgggttcacac

SEQ ID NO: 6795 - RNA, 21 nt, synthetic construct
  misc_feature 1..21: note = Synthetic
  source 1..21: mol_type = other RNA
ctccggacatcagtgcaacag

SEQ ID NO: 6796 - RNA, 21 nt, synthetic construct
  misc_feature 1..21: note = Synthetic
  source 1..21: mol_type = other RNA
ctccggggacccgggacttgt

SEQ ID NO: 6797 - RNA, 21 nt, synthetic construct
  misc_feature 1..21: note = Synthetic
  source 1..21: mol_type = other RNA
ctccggtccagcgtcatcttc

SEQ ID NO: 6798 - RNA, 21 nt, synthetic construct
  misc_feature 1..21: note = Synthetic
  source 1..21: mol_type = other RNA
ctccgtggcgatggggaggac

SEQ ID NO: 6799 - RNA, 21 nt, synthetic construct
  misc_feature 1..21: note = Synthetic
  source 1..21: mol_type = other RNA
ctccgtgtccagagcgaccac

SEQ ID NO: 6800 - RNA, 21 nt, synthetic construct
  misc_feature 1..21: note = Synthetic
  source 1..21: mol_type = other RNA
ctcctcatgtccctggccagc

SEQ ID NO: 6801 - RNA, 21 nt, synthetic construct
  misc_feature 1..21: note = Synthetic
  source 1..21: mol_type = other RNA
ctcctcttggctgggtgaggt

SEQ ID NO: 6802 - RNA, 21 nt, synthetic construct
  misc_feature 1..21: note = Synthetic
  source 1..21: mol_type = other RNA
ctcctgaactcaagtgatcca

SEQ ID NO: 6803 - RNA, 21 nt, synthetic construct
  misc_feature 1..21: note = Synthetic
  source 1..21: mol_type = other RNA
ctcctgacctcatgatccacc

SEQ ID NO: 6804 - RNA, 21 nt, synthetic construct
  misc_feature 1..21: note = Synthetic
  source 1..21: mol_type = other RNA
ctcctgagtttaggggtttgg

SEQ ID NO: 6805 - RNA, 21 nt, synthetic construct
  misc_feature 1..21: note = Synthetic
  source 1..21: mol_type = other RNA
ctcctgcctcagcctcccaag

SEQ ID NO: 6806 - RNA, 21 nt, synthetic construct
  misc_feature 1..21: note = Synthetic
  source 1..21: mol_type = other RNA
ctcctgcctcagcctcccgag

SEQ ID NO: 6807 - RNA, 21 nt, synthetic construct
  misc_feature 1..21: note = Synthetic
  source 1..21: mol_type = other RNA
ctcctgggactcatcagagcc

SEQ ID NO: 6808 - RNA, 21 nt, synthetic construct
  misc_feature 1..21: note = Synthetic
  source 1..21: mol_type = other RNA
ctcctgggctcaggcgatcct

SEQ ID NO: 6809 - RNA, 21 nt, synthetic construct
  misc_feature 1..21: note = Synthetic
  source 1..21: mol_type = other RNA
ctcctgggtggccactgcagc

SEQ ID NO: 6810 - RNA, 21 nt, synthetic construct
  misc_feature 1..21: note = Synthetic
  source 1..21: mol_type = other RNA
ctcgaaagacactgggtgggt

SEQ ID NO: 6811 - RNA, 21 nt, synthetic construct
  misc_feature 1..21: note = Synthetic
  source 1..21: mol_type = other RNA
ctcgaaggccgagcaggggct

SEQ ID NO: 6812 - RNA, 21 nt, synthetic construct
  misc_feature 1..21: note = Synthetic
  source 1..21: mol_type = other RNA
ctcgaggggtagctgtagccg

SEQ ID NO: 6813 - RNA, 21 nt, synthetic construct
  misc_feature 1..21: note = Synthetic
  source 1..21: mol_type = other RNA
ctcgatattcacgatcacggc

SEQ ID NO: 6814 - RNA, 21 nt, synthetic construct
  misc_feature 1..21: note = Synthetic
  source 1..21: mol_type = other RNA
ctcgatcatggctcactgcaa

SEQ ID NO: 6815 - RNA, 21 nt, synthetic construct
  misc_feature 1..21: note = Synthetic
  source 1..21: mol_type = other RNA
ctcgatctcctgacctcatga

SEQ ID NO: 6816 - RNA, 21 nt, synthetic construct
  misc_feature 1..21: note = Synthetic
  source 1..21: mol_type = other RNA
ctcgcagagtgtcacattaac

SEQ ID NO: 6817 - RNA, 21 nt, synthetic construct
  misc_feature 1..21: note = Synthetic
  source 1..21: mol_type = other RNA
ctcgcagagtgtcagacagcc

SEQ ID NO: 6818 - RNA, 21 nt, synthetic construct
  misc_feature 1..21: note = Synthetic
  source 1..21: mol_type = other RNA
ctcgcagcctctgccaggcag

SEQ ID NO: 6819 - RNA, 21 nt, synthetic construct
  misc_feature 1..21: note = Synthetic
  source 1..21: mol_type = other RNA
ctcgccacttaggcagtggaa

SEQ ID NO: 6820 - RNA, 21 nt, synthetic construct
  misc_feature 1..21: note = Synthetic
  source 1..21: mol_type = other RNA
ctcgccatgcctggccagagg

SEQ ID NO: 6821 - RNA, 21 nt, synthetic construct
  misc_feature 1..21: note = Synthetic
  source 1..21: mol_type = other RNA
ctcgctccggtccagcgtcat

SEQ ID NO: 6822 - RNA, 21 nt, synthetic construct
  misc_feature 1..21: note = Synthetic
  source 1..21: mol_type = other RNA
ctcgctctgtcgcccaggcca

SEQ ID NO: 6823 - RNA, 21 nt, synthetic construct
  misc_feature 1..21: note = Synthetic
  source 1..21: mol_type = other RNA
ctcgctttgttgctcaggcct

SEQ ID NO: 6824 - RNA, 21 nt, synthetic construct
  misc_feature 1..21: note = Synthetic
  source 1..21: mol_type = other RNA
ctcggcctcccaaagtgctgg

SEQ ID NO: 6825 - RNA, 21 nt, synthetic construct
  misc_feature 1..21: note = Synthetic
  source 1..21: mol_type = other RNA
ctcggctcactgcaagctccg

SEQ ID NO: 6826 - RNA, 21 nt, synthetic construct
  misc_feature 1..21: note = Synthetic
  source 1..21: mol_type = other RNA
ctcggctgcagaccaaggagg

SEQ ID NO: 6827 - RNA, 21 nt, synthetic construct
  misc_feature 1..21: note = Synthetic
  source 1..21: mol_type = other RNA
ctcggtgccaccacggattca

SEQ ID NO: 6828 - RNA, 21 nt, synthetic construct
  misc_feature 1..21: note = Synthetic
  source 1..21: mol_type = other RNA
ctcgtaaggaaccgaggcctt

SEQ ID NO: 6829 - RNA, 21 nt, synthetic construct
  misc_feature 1..21: note = Synthetic
  source 1..21: mol_type = other RNA
ctcgtagccgatcttaaggtc

SEQ ID NO: 6830 - RNA, 21 nt, synthetic construct
  misc_feature 1..21: note = Synthetic
  source 1..21: mol_type = other RNA
ctcgtcagatttgtccttgca

SEQ ID NO: 6831 - RNA, 21 nt, synthetic construct
  misc_feature 1..21: note = Synthetic
  source 1..21: mol_type = other RNA
ctcgtcctgggagcacgtctt

SEQ ID NO: 6832 - RNA, 21 nt, synthetic construct
  misc_feature 1..21: note = Synthetic
  source 1..21: mol_type = other RNA
ctcgtctgagccgtccaagca

SEQ ID NO: 6833 - RNA, 21 nt, synthetic construct
  misc_feature 1..21: note = Synthetic
  source 1..21: mol_type = other RNA
ctcgtctgagccgttgtcgca

SEQ ID NO: 6834 - RNA, 21 nt, synthetic construct
  misc_feature 1..21: note = Synthetic
  source 1..21: mol_type = other RNA
ctcgtgccggttggtgaagaa

SEQ ID NO: 6835 - RNA, 21 nt, synthetic construct
  misc_feature 1..21: note = Synthetic
  source 1..21: mol_type = other RNA
ctcgtgtatgtcgcggaggcg

SEQ ID NO: 6836 - RNA, 21 nt, synthetic construct
  misc_feature 1..21: note = Synthetic
  source 1..21: mol_type = other RNA
ctcgtttctttcgcatctgtc

SEQ ID NO: 6837 - RNA, 21 nt, synthetic construct
  misc_feature 1..21: note = Synthetic
  source 1..21: mol_type = other RNA
ctctagccatgttgcagactt

SEQ ID NO: 6838 - RNA, 21 nt, synthetic construct
  misc_feature 1..21: note = Synthetic
  source 1..21: mol_type = other RNA
ctctcacaccagttcactcct

SEQ ID NO: 6839 - RNA, 21 nt, synthetic construct
  misc_feature 1..21: note = Synthetic
  source 1..21: mol_type = other RNA
ctctccggacatcagtgcaac

SEQ ID NO: 6840 - RNA, 21 nt, synthetic construct
  misc_feature 1..21: note = Synthetic
  source 1..21: mol_type = other RNA
ctctctgtccccggcattcat

SEQ ID NO: 6841 - RNA, 21 nt, synthetic construct
  misc_feature 1..21: note = Synthetic
  source 1..21: mol_type = other RNA
ctctcttggctgggtgaggtt

SEQ ID NO: 6842 - RNA, 21 nt, synthetic construct
  misc_feature 1..21: note = Synthetic
  source 1..21: mol_type = other RNA
ctctgaactgagaaagtgcaa

SEQ ID NO: 6843 - RNA, 21 nt, synthetic construct
  misc_feature 1..21: note = Synthetic
  source 1..21: mol_type = other RNA
ctctgccagcaacgtcgccca

SEQ ID NO: 6844 - RNA, 21 nt, synthetic construct
  misc_feature 1..21: note = Synthetic
  source 1..21: mol_type = other RNA
ctctgccaggcagtgtcccga

SEQ ID NO: 6845 - RNA, 21 nt, synthetic construct
  misc_feature 1..21: note = Synthetic
  source 1..21: mol_type = other RNA
ctctgcctctgggaagtggca

SEQ ID NO: 6846 - RNA, 21 nt, synthetic construct
  misc_feature 1..21: note = Synthetic
  source 1..21: mol_type = other RNA
ctctgctgatgacggtgtcat

SEQ ID NO: 6847 - RNA, 21 nt, synthetic construct
  misc_feature 1..21: note = Synthetic
  source 1..21: mol_type = other RNA
ctctggcaggcaatgctttgg

SEQ ID NO: 6848 - RNA, 21 nt, synthetic construct
  misc_feature 1..21: note = Synthetic
  source 1..21: mol_type = other RNA
ctctgggaagtggcatcattt

SEQ ID NO: 6849 - RNA, 21 nt, synthetic construct
  misc_feature 1..21: note = Synthetic
  source 1..21: mol_type = other RNA
ctctgggacaggtcagaccag

SEQ ID NO: 6850 - RNA, 21 nt, synthetic construct
  misc_feature 1..21: note = Synthetic
  source 1..21: mol_type = other RNA
ctctgggcctgacatcccctc

SEQ ID NO: 6851 - RNA, 21 nt, synthetic construct
  misc_feature 1..21: note = Synthetic
  source 1..21: mol_type = other RNA
ctctggggacagtaggttttc

SEQ ID NO: 6852 - RNA, 21 nt, synthetic construct
  misc_feature 1..21: note = Synthetic
  source 1..21: mol_type = other RNA
ctctgtcaagctgggtgctgc

SEQ ID NO: 6853 - RNA, 21 nt, synthetic construct
  misc_feature 1..21: note = Synthetic
  source 1..21: mol_type = other RNA
ctctgtcacacagctgccccc

SEQ ID NO: 6854 - RNA, 21 nt, synthetic construct
  misc_feature 1..21: note = Synthetic
  source 1..21: mol_type = other RNA
ctctgtccccggcattcattg

SEQ ID NO: 6855 - RNA, 21 nt, synthetic construct
  misc_feature 1..21: note = Synthetic
  source 1..21: mol_type = other RNA
ctctgtcgcccaggccagact

SEQ ID NO: 6856 - RNA, 21 nt, synthetic construct
  misc_feature 1..21: note = Synthetic
  source 1..21: mol_type = other RNA
ctctgtctttgaataaaacaa

SEQ ID NO: 6857 - RNA, 21 nt, synthetic construct
  misc_feature 1..21: note = Synthetic
  source 1..21: mol_type = other RNA
ctctgtgaacttgatcggggc

SEQ ID NO: 6858 - RNA, 21 nt, synthetic construct
  misc_feature 1..21: note = Synthetic
  source 1..21: mol_type = other RNA
ctctgtgaggcagctcctcat

SEQ ID NO: 6859 - RNA, 21 nt, synthetic construct
  misc_feature 1..21: note = Synthetic
  source 1..21: mol_type = other RNA
ctctgtggtcttctgatagac

SEQ ID NO: 6860 - RNA, 21 nt, synthetic construct
  misc_feature 1..21: note = Synthetic
  source 1..21: mol_type = other RNA
ctcttatccttcacgaggaaa

SEQ ID NO: 6861 - RNA, 21 nt, synthetic construct
  misc_feature 1..21: note = Synthetic
  source 1..21: mol_type = other RNA
ctcttcacgcccttggtatcc

SEQ ID NO: 6862 - RNA, 21 nt, synthetic construct
  misc_feature 1..21: note = Synthetic
  source 1..21: mol_type = other RNA
ctcttggctgggtgaggttgt

SEQ ID NO: 6863 - RNA, 21 nt, synthetic construct
  misc_feature 1..21: note = Synthetic
  source 1..21: mol_type = other RNA
ctctttgatgggttcatctga

SEQ ID NO: 6864 - RNA, 21 nt, synthetic construct
  misc_feature 1..21: note = Synthetic
  source 1..21: mol_type = other RNA
ctcttttcatcctccaagatg

SEQ ID NO: 6865 - RNA, 21 nt, synthetic construct
  misc_feature 1..21: note = Synthetic
  source 1..21: mol_type = other RNA
ctgaaaatggcttcgttgatg

SEQ ID NO: 6866 - RNA, 21 nt, synthetic construct
  misc_feature 1..21: note = Synthetic
  source 1..21: mol_type = other RNA
ctgaaatagggtcttcatctg

SEQ ID NO: 6867 - RNA, 21 nt, synthetic construct
  misc_feature 1..21: note = Synthetic
  source 1..21: mol_type = other RNA
ctgaacaaatacagcaaccag

SEQ ID NO: 6868 - RNA, 21 nt, synthetic construct
  misc_feature 1..21: note = Synthetic
  source 1..21: mol_type = other RNA
ctgaactcaagtgatccagct

SEQ ID NO: 6869 - RNA, 21 nt, synthetic construct
  misc_feature 1..21: note = Synthetic
  source 1..21: mol_type = other RNA
ctgaactgagaaagtgcaagg

SEQ ID NO: 6870 - RNA, 21 nt, synthetic construct
  misc_feature 1..21: note = Synthetic
  source 1..21: mol_type = other RNA
ctgaagatctcggctgcagac

SEQ ID NO: 6871 - RNA, 21 nt, synthetic construct
  misc_feature 1..21: note = Synthetic
  source 1..21: mol_type = other RNA
ctgaagtccccggatttgcag

SEQ ID NO: 6872 - RNA, 21 nt, synthetic construct
  misc_feature 1..21: note = Synthetic
  source 1..21: mol_type = other RNA
ctgaagtcccgtcaaacgatc

SEQ ID NO: 6873 - RNA, 21 nt, synthetic construct
  misc_feature 1..21: note = Synthetic
  source 1..21: mol_type = other RNA
ctgaataacgttttcctcttc

SEQ ID NO: 6874 - RNA, 21 nt, synthetic construct
  misc_feature 1..21: note = Synthetic
  source 1..21: mol_type = other RNA
ctgaatgttttcagtcaccag

SEQ ID NO: 6875 - RNA, 21 nt, synthetic construct
  misc_feature 1..21: note = Synthetic
  source 1..21: mol_type = other RNA
ctgacactcatcgatatcgca

SEQ ID NO: 6876 - RNA, 21 nt, synthetic construct
  misc_feature 1..21: note = Synthetic
  source 1..21: mol_type = other RNA
ctgacactcatcgatatcttc

SEQ ID NO: 6877 - RNA, 21 nt, synthetic construct
  misc_feature 1..21: note = Synthetic
  source 1..21: mol_type = other RNA
ctgacagccacacctgggtgc

SEQ ID NO: 6878 - RNA, 21 nt, synthetic construct
  misc_feature 1..21: note = Synthetic
  source 1..21: mol_type = other RNA
ctgacatcccctcccctttca

SEQ ID NO: 6879 - RNA, 21 nt, synthetic construct
  misc_feature 1..21: note = Synthetic
  source 1..21: mol_type = other RNA
ctgaccagtcccggcagtctc

SEQ ID NO: 6880 - RNA, 21 nt, synthetic construct
  misc_feature 1..21: note = Synthetic
  source 1..21: mol_type = other RNA
ctgaccatcgaggggtagctg

SEQ ID NO: 6881 - RNA, 21 nt, synthetic construct
  misc_feature 1..21: note = Synthetic
  source 1..21: mol_type = other RNA
ctgaccatctgtctcgagggg

SEQ ID NO: 6882 - RNA, 21 nt, synthetic construct
  misc_feature 1..21: note = Synthetic
  source 1..21: mol_type = other RNA
ctgacctcatgatccacccgc

SEQ ID NO: 6883 - RNA, 21 nt, synthetic construct
  misc_feature 1..21: note = Synthetic
  source 1..21: mol_type = other RNA
ctgacctcgtgccggttggtg

SEQ ID NO: 6884 - RNA, 21 nt, synthetic construct
  misc_feature 1..21: note = Synthetic
  source 1..21: mol_type = other RNA
ctgacctttagcctgacggtg

SEQ ID NO: 6885 - RNA, 21 nt, synthetic construct
  misc_feature 1..21: note = Synthetic
  source 1..21: mol_type = other RNA
ctgacggaggctgtcactgtc

SEQ ID NO: 6886 - RNA, 21 nt, synthetic construct
  misc_feature 1..21: note = Synthetic
  source 1..21: mol_type = other RNA
ctgacggtggatgtctcctgg

SEQ ID NO: 6887 - RNA, 21 nt, synthetic construct
  misc_feature 1..21: note = Synthetic
  source 1..21: mol_type = other RNA
ctgagaaagtgcaaggagacc

SEQ ID NO: 6888 - RNA, 21 nt, synthetic construct
  misc_feature 1..21: note = Synthetic
  source 1..21: mol_type = other RNA
ctgagccgtccaagcagtccc

SEQ ID NO: 6889 - RNA, 21 nt, synthetic construct
  misc_feature 1..21: note = Synthetic
  source 1..21: mol_type = other RNA
ctgagccgttgtcgcagtcca

SEQ ID NO: 6890 - RNA, 21 nt, synthetic construct
  misc_feature 1..21: note = Synthetic
  source 1..21: mol_type = other RNA
ctgagctcaaaccatcctccc

SEQ ID NO: 6891 - RNA, 21 nt, synthetic construct
  misc_feature 1..21: note = Synthetic
  source 1..21: mol_type = other RNA
ctgaggaatgcagcggttgac

SEQ ID NO: 6892 - RNA, 21 nt, synthetic construct
  misc_feature 1..21: note = Synthetic
  source 1..21: mol_type = other RNA
ctgaggagatctagggtgatg

SEQ ID NO: 6893 - RNA, 21 nt, synthetic construct
  misc_feature 1..21: note = Synthetic
  source 1..21: mol_type = other RNA
ctgaggcaacgtttcaacctc

SEQ ID NO: 6894 - RNA, 21 nt, synthetic construct
  misc_feature 1..21: note = Synthetic
  source 1..21: mol_type = other RNA
ctgagtcacagacgaactgcc

SEQ ID NO: 6895 - RNA, 21 nt, synthetic construct
  misc_feature 1..21: note = Synthetic
  source 1..21: mol_type = other RNA
ctgagtttaggggtttggctt

SEQ ID NO: 6896 - RNA, 21 nt, synthetic construct
  misc_feature 1..21: note = Synthetic
  source 1..21: mol_type = other RNA
ctgatagacggggttgtcaaa

SEQ ID NO: 6897 - RNA, 21 nt, synthetic construct
  misc_feature 1..21: note = Synthetic
  source 1..21: mol_type = other RNA
ctgatgacggtgtcataggaa

SEQ ID NO: 6898 - RNA, 21 nt, synthetic construct
  misc_feature 1..21: note = Synthetic
  source 1..21: mol_type = other RNA
ctgatgcaccatgcatggttt

SEQ ID NO: 6899 - RNA, 21 nt, synthetic construct
  misc_feature 1..21: note = Synthetic
  source 1..21: mol_type = other RNA
ctgatttttaactttttggtt

SEQ ID NO: 6900 - RNA, 21 nt, synthetic construct
  misc_feature 1..21: note = Synthetic
  source 1..21: mol_type = other RNA
ctgcaacctccacctcctggg

SEQ ID NO: 6901 - RNA, 21 nt, synthetic construct
  misc_feature 1..21: note = Synthetic
  source 1..21: mol_type = other RNA
ctgcaagctccgcttcccggg

SEQ ID NO: 6902 - RNA, 21 nt, synthetic construct
  misc_feature 1..21: note = Synthetic
  source 1..21: mol_type = other RNA
ctgcactgggggggacacagt

SEQ ID NO: 6903 - RNA, 21 nt, synthetic construct
  misc_feature 1..21: note = Synthetic
  source 1..21: mol_type = other RNA
ctgcagaccaaggaggggcgg

SEQ ID NO: 6904 - RNA, 21 nt, synthetic construct
  misc_feature 1..21: note = Synthetic
  source 1..21: mol_type = other RNA
ctgcagatcattctctgggac

SEQ ID NO: 6905 - RNA, 21 nt, synthetic construct
  misc_feature 1..21: note = Synthetic
  source 1..21: mol_type = other RNA
ctgcagcctcagcctctcttg

SEQ ID NO: 6906 - RNA, 21 nt, synthetic construct
  misc_feature 1..21: note = Synthetic
  source 1..21: mol_type = other RNA
ctgcagcctcagcctctgtga

SEQ ID NO: 6907 - RNA, 21 nt, synthetic construct
  misc_feature 1..21: note = Synthetic
  source 1..21: mol_type = other RNA
ctgcaggtgtcgggatcctga

SEQ ID NO: 6908 - RNA, 21 nt, synthetic construct
  misc_feature 1..21: note = Synthetic
  source 1..21: mol_type = other RNA
ctgcagtccccgccgcggcga

SEQ ID NO: 6909 - RNA, 21 nt, synthetic construct
  misc_feature 1..21: note = Synthetic
  source 1..21: mol_type = other RNA
ctgcagtggcgcaatctcggc

SEQ ID NO: 6910 - RNA, 21 nt, synthetic construct
  misc_feature 1..21: note = Synthetic
  source 1..21: mol_type = other RNA
ctgccagcaacgtcgcccaga

SEQ ID NO: 6911 - RNA, 21 nt, synthetic construct
  misc_feature 1..21: note = Synthetic
  source 1..21: mol_type = other RNA
ctgccaggcagtgtcccgacc

SEQ ID NO: 6912 - RNA, 21 nt, synthetic construct
  misc_feature 1..21: note = Synthetic
  source 1..21: mol_type = other RNA
ctgccatcgcagacccacttg

SEQ ID NO: 6913 - RNA, 21 nt, synthetic construct
  misc_feature 1..21: note = Synthetic
  source 1..21: mol_type = other RNA
ctgccatggatgcagtttcca

SEQ ID NO: 6914 - RNA, 21 nt, synthetic construct
  misc_feature 1..21: note = Synthetic
  source 1..21: mol_type = other RNA
ctgcccccgagaccagagacc

SEQ ID NO: 6915 - RNA, 21 nt, synthetic construct
  misc_feature 1..21: note = Synthetic
  source 1..21: mol_type = other RNA
ctgcccctctctgtccccggc

SEQ ID NO: 6916 - RNA, 21 nt, synthetic construct
  misc_feature 1..21: note = Synthetic
  source 1..21: mol_type = other RNA
ctgccgagagatgcacttccc

SEQ ID NO: 6917 - RNA, 21 nt, synthetic construct
  misc_feature 1..21: note = Synthetic
  source 1..21: mol_type = other RNA
ctgccggctgccatggatgca

SEQ ID NO: 6918 - RNA, 21 nt, synthetic construct
  misc_feature 1..21: note = Synthetic
  source 1..21: mol_type = other RNA
ctgcctcagcctcccaagtag

SEQ ID NO: 6919 - RNA, 21 nt, synthetic construct
  misc_feature 1..21: note = Synthetic
  source 1..21: mol_type = other RNA
ctgcctcagcctcccgagtag

SEQ ID NO: 6920 - RNA, 21 nt, synthetic construct
  misc_feature 1..21: note = Synthetic
  source 1..21: mol_type = other RNA
ctgcctcccagatgaataaat

SEQ ID NO: 6921 - RNA, 21 nt, synthetic construct
  misc_feature 1..21: note = Synthetic
  source 1..21: mol_type = other RNA
ctgcctctgggaagtggcatc

SEQ ID NO: 6922 - RNA, 21 nt, synthetic construct
  misc_feature 1..21: note = Synthetic
  source 1..21: mol_type = other RNA
ctgcgcccggcctcaccgtgc

SEQ ID NO: 6923 - RNA, 21 nt, synthetic construct
  misc_feature 1..21: note = Synthetic
  source 1..21: mol_type = other RNA
ctgcggactgcagtggcgcaa

SEQ ID NO: 6924 - RNA, 21 nt, synthetic construct
  misc_feature 1..21: note = Synthetic
  source 1..21: mol_type = other RNA
ctgcggccactcatccgagcc

SEQ ID NO: 6925 - RNA, 21 nt, synthetic construct
  misc_feature 1..21: note = Synthetic
  source 1..21: mol_type = other RNA
ctgcggggcagggaggcacag

SEQ ID NO: 6926 - RNA, 21 nt, synthetic construct
  misc_feature 1..21: note = Synthetic
  source 1..21: mol_type = other RNA
ctgctgatgacggtgtcatag

SEQ ID NO: 6927 - RNA, 21 nt, synthetic construct
  misc_feature 1..21: note = Synthetic
  source 1..21: mol_type = other RNA
ctgctgatgcaccatgcatgg

SEQ ID NO: 6928 - RNA, 21 nt, synthetic construct
  misc_feature 1..21: note = Synthetic
  source 1..21: mol_type = other RNA
ctgctgtgtcctagctggaaa

SEQ ID NO: 6929 - RNA, 21 nt, synthetic construct
  misc_feature 1..21: note = Synthetic
  source 1..21: mol_type = other RNA
ctgctgttgtgtgttgaaagc

SEQ ID NO: 6930 - RNA, 21 nt, synthetic construct
  misc_feature 1..21: note = Synthetic
  source 1..21: mol_type = other RNA
ctggaaaccctggcttcccgc

SEQ ID NO: 6931 - RNA, 21 nt, synthetic construct
  misc_feature 1..21: note = Synthetic
  source 1..21: mol_type = other RNA
ctggaaagcagtggcataatc

SEQ ID NO: 6932 - RNA, 21 nt, synthetic construct
  misc_feature 1..21: note = Synthetic
  source 1..21: mol_type = other RNA
ctggaactcgtttctttcgca

SEQ ID NO: 6933 - RNA, 21 nt, synthetic construct
  misc_feature 1..21: note = Synthetic
  source 1..21: mol_type = other RNA
ctggaagccgtcggggcacag

SEQ ID NO: 6934 - RNA, 21 nt, synthetic construct
  misc_feature 1..21: note = Synthetic
  source 1..21: mol_type = other RNA
ctggaagccttcctcacactg

SEQ ID NO: 6935 - RNA, 21 nt, synthetic construct
  misc_feature 1..21: note = Synthetic
  source 1..21: mol_type = other RNA
ctggaagctggcgggaccaca

SEQ ID NO: 6936 - RNA, 21 nt, synthetic construct
  misc_feature 1..21: note = Synthetic
  source 1..21: mol_type = other RNA
ctggaattcgtcagggcgaca

SEQ ID NO: 6937 - RNA, 21 nt, synthetic construct
  misc_feature 1..21: note = Synthetic
  source 1..21: mol_type = other RNA
ctggagagaaatggaggtgtc

SEQ ID NO: 6938 - RNA, 21 nt, synthetic construct
  misc_feature 1..21: note = Synthetic
  source 1..21: mol_type = other RNA
ctggaggatttatttattttt

SEQ ID NO: 6939 - RNA, 21 nt, synthetic construct
  misc_feature 1..21: note = Synthetic
  source 1..21: mol_type = other RNA
ctggagtgcagtggctcgatc

SEQ ID NO: 6940 - RNA, 21 nt, synthetic construct
  misc_feature 1..21: note = Synthetic
  source 1..21: mol_type = other RNA
ctggagtggatgcactcgcca

SEQ ID NO: 6941 - RNA, 21 nt, synthetic construct
  misc_feature 1..21: note = Synthetic
  source 1..21: mol_type = other RNA
ctggatgtctctgctgatgac

SEQ ID NO: 6942 - RNA, 21 nt, synthetic construct
  misc_feature 1..21: note = Synthetic
  source 1..21: mol_type = other RNA
ctggcactcagcgctgccatc

SEQ ID NO: 6943 - RNA, 21 nt, synthetic construct
  misc_feature 1..21: note = Synthetic
  source 1..21: mol_type = other RNA
ctggcacttgtagccaccctc

SEQ ID NO: 6944 - RNA, 21 nt, synthetic construct
  misc_feature 1..21: note = Synthetic
  source 1..21: mol_type = other RNA
ctggcagccgccattgctcag

SEQ ID NO: 6945 - RNA, 21 nt, synthetic construct
  misc_feature 1..21: note = Synthetic
  source 1..21: mol_type = other RNA
ctggcaggcaatgctttggtc

SEQ ID NO: 6946 - RNA, 21 nt, synthetic construct
  misc_feature 1..21: note = Synthetic
  source 1..21: mol_type = other RNA
ctggccaaattcattttttaa

SEQ ID NO: 6947 - RNA, 21 nt, synthetic construct
  misc_feature 1..21: note = Synthetic
  source 1..21: mol_type = other RNA
ctggccacctccgtgtccaga

SEQ ID NO: 6948 - RNA, 21 nt, synthetic construct
  misc_feature 1..21: note = Synthetic
  source 1..21: mol_type = other RNA
ctggccagaggccatgggctg

SEQ ID NO: 6949 - RNA, 21 nt, synthetic construct
  misc_feature 1..21: note = Synthetic
  source 1..21: mol_type = other RNA
ctggccagcagcatgccgtcc

SEQ ID NO: 6950 - RNA, 21 nt, synthetic construct
  misc_feature 1..21: note = Synthetic
  source 1..21: mol_type = other RNA
ctggcctgggatcccatccca

SEQ ID NO: 6951 - RNA, 21 nt, synthetic construct
  misc_feature 1..21: note = Synthetic
  source 1..21: mol_type = other RNA
ctggcgggaccacaggtgagc

SEQ ID NO: 6952 - RNA, 21 nt, synthetic construct
  misc_feature 1..21: note = Synthetic
  source 1..21: mol_type = other RNA
ctggctgcaggtgtcgggatc

SEQ ID NO: 6953 - RNA, 21 nt, synthetic construct
  misc_feature 1..21: note = Synthetic
  source 1..21: mol_type = other RNA
ctggctgtctagcaaggcttg

SEQ ID NO: 6954 - RNA, 21 nt, synthetic construct
  misc_feature 1..21: note = Synthetic
  source 1..21: mol_type = other RNA
ctggcttaaggaaggtacaaa

SEQ ID NO: 6955 - RNA, 21 nt, synthetic construct
  misc_feature 1..21: note = Synthetic
  source 1..21: mol_type = other RNA
ctggcttcccgcgattgcact

SEQ ID NO: 6956 - RNA, 21 nt, synthetic construct
  misc_feature 1..21: note = Synthetic
  source 1..21: mol_type = other RNA
ctgggaagtggcatcatttgg

SEQ ID NO: 6957 - RNA, 21 nt, synthetic construct
  misc_feature 1..21: note = Synthetic
  source 1..21: mol_type = other RNA
ctgggacaggtcagaccagta

SEQ ID NO: 6958 - RNA, 21 nt, synthetic construct
  misc_feature 1..21: note = Synthetic
  source 1..21: mol_type = other RNA
ctgggactacaggtgcccgcc

SEQ ID NO: 6959 - RNA, 21 nt, synthetic construct
  misc_feature 1..21: note = Synthetic
  source 1..21: mol_type = other RNA
ctgggactcatcagagccatc

SEQ ID NO: 6960 - RNA, 21 nt, synthetic construct
  misc_feature 1..21: note = Synthetic
  source 1..21: mol_type = other RNA
ctgggagcacgtcttggggga

SEQ ID NO: 6961 - RNA, 21 nt, synthetic construct
  misc_feature 1..21: note = Synthetic
  source 1..21: mol_type = other RNA
ctgggagcacgtcttgggggg

SEQ ID NO: 6962 - RNA, 21 nt, synthetic construct
  misc_feature 1..21: note = Synthetic
  source 1..21: mol_type = other RNA
ctgggatcacaggcacgtgcc

SEQ ID NO: 6963 - RNA, 21 nt, synthetic construct
  misc_feature 1..21: note = Synthetic
  source 1..21: mol_type = other RNA
ctgggatcccatcccaacaca

SEQ ID NO: 6964 - RNA, 21 nt, synthetic construct
  misc_feature 1..21: note = Synthetic
  source 1..21: mol_type = other RNA
ctgggattacaggcgtgagcc

SEQ ID NO: 6965 - RNA, 21 nt, synthetic construct
  misc_feature 1..21: note = Synthetic
  source 1..21: mol_type = other RNA
ctgggattacaggcgtgaggc

SEQ ID NO: 6966 - RNA, 21 nt, synthetic construct
  misc_feature 1..21: note = Synthetic
  source 1..21: mol_type = other RNA
ctgggcagggacgggactcca

SEQ ID NO: 6967 - RNA, 21 nt, synthetic construct
  misc_feature 1..21: note = Synthetic
  source 1..21: mol_type = other RNA
ctgggccaccagctggaagcc

SEQ ID NO: 6968 - RNA, 21 nt, synthetic construct
  misc_feature 1..21: note = Synthetic
  source 1..21: mol_type = other RNA
ctgggcctgacatcccctccc

SEQ ID NO: 6969 - RNA, 21 nt, synthetic construct
  misc_feature 1..21: note = Synthetic
  source 1..21: mol_type = other RNA
ctgggctcaggcgatcctcct

SEQ ID NO: 6970 - RNA, 21 nt, synthetic construct
  misc_feature 1..21: note = Synthetic
  source 1..21: mol_type = other RNA
ctgggcttcttctcatttcct

SEQ ID NO: 6971 - RNA, 21 nt, synthetic construct
  misc_feature 1..21: note = Synthetic
  source 1..21: mol_type = other RNA
ctggggacaattgccaatccc

SEQ ID NO: 6972 - RNA, 21 nt, synthetic construct
  misc_feature 1..21: note = Synthetic
  source 1..21: mol_type = other RNA
ctggggacagtaggttttcag

SEQ ID NO: 6973 - RNA, 21 nt, synthetic construct
  misc_feature 1..21: note = Synthetic
  source 1..21: mol_type = other RNA
ctgggggatgcaggtggagct

SEQ ID NO: 6974 - RNA, 21 nt, synthetic construct
  misc_feature 1..21: note = Synthetic
  source 1..21: mol_type = other RNA
ctgggggggacacagtgtttt

SEQ ID NO: 6975 - RNA, 21 nt, synthetic construct
  misc_feature 1..21: note = Synthetic
  source 1..21: mol_type = other RNA
ctgggtgaggttgtggaagag

SEQ ID NO: 6976 - RNA, 21 nt, synthetic construct
  misc_feature 1..21: note = Synthetic
  source 1..21: mol_type = other RNA
ctgggtgcaggccacgtgtcc

SEQ ID NO: 6977 - RNA, 21 nt, synthetic construct
  misc_feature 1..21: note = Synthetic
  source 1..21: mol_type = other RNA
ctgggtgctgcagatcattct

SEQ ID NO: 6978 - RNA, 21 nt, synthetic construct
  misc_feature 1..21: note = Synthetic
  source 1..21: mol_type = other RNA
ctgggtggccactgcagcctc

SEQ ID NO: 6979 - RNA, 21 nt, synthetic construct
  misc_feature 1..21: note = Synthetic
  source 1..21: mol_type = other RNA
ctgggtgggtcatgattcggg

SEQ ID NO: 6980 - RNA, 21 nt, synthetic construct
  misc_feature 1..21: note = Synthetic
  source 1..21: mol_type = other RNA
ctggtccccccgggcctgttt

SEQ ID NO: 6981 - RNA, 21 nt, synthetic construct
  misc_feature 1..21: note = Synthetic
  source 1..21: mol_type = other RNA
ctggtctccaactcctgaact

SEQ ID NO: 6982 - RNA, 21 nt, synthetic construct
  misc_feature 1..21: note = Synthetic
  source 1..21: mol_type = other RNA
ctggtggggcgagggcgcccc

SEQ ID NO: 6983 - RNA, 21 nt, synthetic construct
  misc_feature 1..21: note = Synthetic
  source 1..21: mol_type = other RNA
ctggtgtactcgctccggtcc

SEQ ID NO: 6984 - RNA, 21 nt, synthetic construct
  misc_feature 1..21: note = Synthetic
  source 1..21: mol_type = other RNA
ctggtgtcctgacagccacac

SEQ ID NO: 6985 - RNA, 21 nt, synthetic construct
  misc_feature 1..21: note = Synthetic
  source 1..21: mol_type = other RNA
ctggttgtggcaaatgtggac

SEQ ID NO: 6986 - RNA, 21 nt, synthetic construct
  misc_feature 1..21: note = Synthetic
  source 1..21: mol_type = other RNA
ctgtacagggacgcatttacg

SEQ ID NO: 6987 - RNA, 21 nt, synthetic construct
  misc_feature 1..21: note = Synthetic
  source 1..21: mol_type = other RNA
ctgtagccgtcctggttgtgg

SEQ ID NO: 6988 - RNA, 21 nt, synthetic construct
  misc_feature 1..21: note = Synthetic
  source 1..21: mol_type = other RNA
ctgtagggagaggcacgctct

SEQ ID NO: 6989 - RNA, 21 nt, synthetic construct
  misc_feature 1..21: note = Synthetic
  source 1..21: mol_type = other RNA
ctgtcaagctgggtgctgcag

SEQ ID NO: 6990 - RNA, 21 nt, synthetic construct
  misc_feature 1..21: note = Synthetic
  source 1..21: mol_type = other RNA
ctgtcacacagctgcccccga

SEQ ID NO: 6991 - RNA, 21 nt, synthetic construct
  misc_feature 1..21: note = Synthetic
  source 1..21: mol_type = other RNA
ctgtcactgtctctccggaca

SEQ ID NO: 6992 - RNA, 21 nt, synthetic construct
  misc_feature 1..21: note = Synthetic
  source 1..21: mol_type = other RNA
ctgtccaaaatactttgtcct

SEQ ID NO: 6993 - RNA, 21 nt, synthetic construct
  misc_feature 1..21: note = Synthetic
  source 1..21: mol_type = other RNA
ctgtccccggcattcattgac

SEQ ID NO: 6994 - RNA, 21 nt, synthetic construct
  misc_feature 1..21: note = Synthetic
  source 1..21: mol_type = other RNA
ctgtccccttggaacacgtaa

SEQ ID NO: 6995 - RNA, 21 nt, synthetic construct
  misc_feature 1..21: note = Synthetic
  source 1..21: mol_type = other RNA
ctgtccgaagcctgttctgcc

SEQ ID NO: 6996 - RNA, 21 nt, synthetic construct
  misc_feature 1..21: note = Synthetic
  source 1..21: mol_type = other RNA
ctgtcgcccacgtggctgaag

SEQ ID NO: 6997 - RNA, 21 nt, synthetic construct
  misc_feature 1..21: note = Synthetic
  source 1..21: mol_type = other RNA
ctgtcgcccactgcagtcccc

SEQ ID NO: 6998 - RNA, 21 nt, synthetic construct
  misc_feature 1..21: note = Synthetic
  source 1..21: mol_type = other RNA
ctgtcgcccaggccagactgc

SEQ ID NO: 6999 - RNA, 21 nt, synthetic construct
  misc_feature 1..21: note = Synthetic
  source 1..21: mol_type = other RNA
ctgtctagcaaggcttgcata

SEQ ID NO: 7000 - RNA, 21 nt, synthetic construct
  misc_feature 1..21: note = Synthetic
  source 1..21: mol_type = other RNA
ctgtctcgaggggtagctgta

SEQ ID NO: 7001 - RNA, 21 nt, synthetic construct
  misc_feature 1..21: note = Synthetic
  source 1..21: mol_type = other RNA
ctgtctctccggacatcagtg

SEQ ID NO: 7002 - RNA, 21 nt, synthetic construct
  misc_feature 1..21: note = Synthetic
  source 1..21: mol_type = other RNA
ctgtctttgaataaaacaagg

SEQ ID NO: 7003 - RNA, 21 nt, synthetic construct
  misc_feature 1..21: note = Synthetic
  source 1..21: mol_type = other RNA
ctgtgaacttgatcggggctg

SEQ ID NO: 7004 - RNA, 21 nt, synthetic construct
  misc_feature 1..21: note = Synthetic
  source 1..21: mol_type = other RNA
ctgtgacacttgaacttgttg

SEQ ID NO: 7005 - RNA, 21 nt, synthetic construct
  misc_feature 1..21: note = Synthetic
  source 1..21: mol_type = other RNA
ctgtgaggcagctcctcatgt

SEQ ID NO: 7006 - RNA, 21 nt, synthetic construct
  misc_feature 1..21: note = Synthetic
  source 1..21: mol_type = other RNA
ctgtgaggcggttggcactga

SEQ ID NO: 7007 - RNA, 21 nt, synthetic construct
  misc_feature 1..21: note = Synthetic
  source 1..21: mol_type = other RNA
ctgtggagctgacctttagcc

SEQ ID NO: 7008 - RNA, 21 nt, synthetic construct
  misc_feature 1..21: note = Synthetic
  source 1..21: mol_type = other RNA
ctgtggatccagtccacagcc

SEQ ID NO: 7009 - RNA, 21 nt, synthetic construct
  misc_feature 1..21: note = Synthetic
  source 1..21: mol_type = other RNA
ctgtggtcttctgatagacgg

SEQ ID NO: 7010 - RNA, 21 nt, synthetic construct
  misc_feature 1..21: note = Synthetic
  source 1..21: mol_type = other RNA
ctgtgtcctagctggaaaccc

SEQ ID NO: 7011 - RNA, 21 nt, synthetic construct
  misc_feature 1..21: note = Synthetic
  source 1..21: mol_type = other RNA
ctgtgtccttacggctgtgga

SEQ ID NO: 7012 - RNA, 21 nt, synthetic construct
  misc_feature 1..21: note = Synthetic
  source 1..21: mol_type = other RNA
ctgtgtctggccaaattcatt

SEQ ID NO: 7013 - RNA, 21 nt, synthetic construct
  misc_feature 1..21: note = Synthetic
  source 1..21: mol_type = other RNA
ctgttctgcctcccagatgaa

SEQ ID NO: 7014 - RNA, 21 nt, synthetic construct
  misc_feature 1..21: note = Synthetic
  source 1..21: mol_type = other RNA
ctgttgatgttcttaagccgc

SEQ ID NO: 7015 - RNA, 21 nt, synthetic construct
  misc_feature 1..21: note = Synthetic
  source 1..21: mol_type = other RNA
ctgttgcactggaagctggcg

SEQ ID NO: 7016 - RNA, 21 nt, synthetic construct
  misc_feature 1..21: note = Synthetic
  source 1..21: mol_type = other RNA
ctgttgcccaggctggagtgc

SEQ ID NO: 7017 - RNA, 21 nt, synthetic construct
  misc_feature 1..21: note = Synthetic
  source 1..21: mol_type = other RNA
ctgttgtgtgttgaaagccac

SEQ ID NO: 7018 - RNA, 21 nt, synthetic construct
  misc_feature 1..21: note = Synthetic
  source 1..21: mol_type = other RNA
ctgtttctcttatccttcacg

SEQ ID NO: 7019 - RNA, 21 nt, synthetic construct
  misc_feature 1..21: note = Synthetic
  source 1..21: mol_type = other RNA
cttaagccgccagttcttcca

SEQ ID NO: 7020 - RNA, 21 nt, synthetic construct
  misc_feature 1..21: note = Synthetic
  source 1..21: mol_type = other RNA
cttaaggaaggtacaaaccca

SEQ ID NO: 7021 - RNA, 21 nt, synthetic construct
  misc_feature 1..21: note = Synthetic
  source 1..21: mol_type = other RNA
cttaaggtcattgcagacgtg

SEQ ID NO: 7022 - RNA, 21 nt, synthetic construct
  misc_feature 1..21: note = Synthetic
  source 1..21: mol_type = other RNA
cttaataaatattaagggtga

SEQ ID NO: 7023 - RNA, 21 nt, synthetic construct
  misc_feature 1..21: note = Synthetic
  source 1..21: mol_type = other RNA
cttacggctgtggagctgacc

SEQ ID NO: 7024 - RNA, 21 nt, synthetic construct
  misc_feature 1..21: note = Synthetic
  source 1..21: mol_type = other RNA
cttactatgttgcccaggctg

SEQ ID NO: 7025 - RNA, 21 nt, synthetic construct
  misc_feature 1..21: note = Synthetic
  source 1..21: mol_type = other RNA
cttagagattggtggatgagg

SEQ ID NO: 7026 - RNA, 21 nt, synthetic construct
  misc_feature 1..21: note = Synthetic
  source 1..21: mol_type = other RNA
cttaggcagtggaactcgaag

SEQ ID NO: 7027 - RNA, 21 nt, synthetic construct
  misc_feature 1..21: note = Synthetic
  source 1..21: mol_type = other RNA
cttatcacggttccctgcact

SEQ ID NO: 7028 - RNA, 21 nt, synthetic construct
  misc_feature 1..21: note = Synthetic
  source 1..21: mol_type = other RNA
cttatccttcacgaggaaagg

SEQ ID NO: 7029 - RNA, 21 nt, synthetic construct
  misc_feature 1..21: note = Synthetic
  source 1..21: mol_type = other RNA
cttcacgaggaaaggaagaaa

SEQ ID NO: 7030 - RNA, 21 nt, synthetic construct
  misc_feature 1..21: note = Synthetic
  source 1..21: mol_type = other RNA
cttcacgcccttggtatccgc

SEQ ID NO: 7031 - RNA, 21 nt, synthetic construct
  misc_feature 1..21: note = Synthetic
  source 1..21: mol_type = other RNA
cttcacgcgggagtctgacgg

SEQ ID NO: 7032 - RNA, 21 nt, synthetic construct
  misc_feature 1..21: note = Synthetic
  source 1..21: mol_type = other RNA
cttcatcgctcatgtccttgc

SEQ ID NO: 7033 - RNA, 21 nt, synthetic construct
  misc_feature 1..21: note = Synthetic
  source 1..21: mol_type = other RNA
cttcatctgttgcccaggctg

SEQ ID NO: 7034 - RNA, 21 nt, synthetic construct
  misc_feature 1..21: note = Synthetic
  source 1..21: mol_type = other RNA
cttccatagaaggaagacccc

SEQ ID NO: 7035 - RNA, 21 nt, synthetic construct
  misc_feature 1..21: note = Synthetic
  source 1..21: mol_type = other RNA
cttccatgtttgaggattgtg

SEQ ID NO: 7036 - RNA, 21 nt, synthetic construct
  misc_feature 1..21: note = Synthetic
  source 1..21: mol_type = other RNA
cttcccatcgtggcagcgaaa

SEQ ID NO: 7037 - RNA, 21 nt, synthetic construct
  misc_feature 1..21: note = Synthetic
  source 1..21: mol_type = other RNA
cttcccgggttcacaccattc

SEQ ID NO: 7038 - RNA, 21 nt, synthetic construct
  misc_feature 1..21: note = Synthetic
  source 1..21: mol_type = other RNA
cttccggttgcccccgttgac

SEQ ID NO: 7039 - RNA, 21 nt, synthetic construct
  misc_feature 1..21: note = Synthetic
  source 1..21: mol_type = other RNA
cttcctcacactggcacttgt

SEQ ID NO: 7040 - RNA, 21 nt, synthetic construct
  misc_feature 1..21: note = Synthetic
  source 1..21: mol_type = other RNA
cttcctgacctcgtgccggtt

SEQ ID NO: 7041 - RNA, 21 nt, synthetic construct
  misc_feature 1..21: note = Synthetic
  source 1..21: mol_type = other RNA
cttcctggagagaaatggagg

SEQ ID NO: 7042 - RNA, 21 nt, synthetic construct
  misc_feature 1..21: note = Synthetic
  source 1..21: mol_type = other RNA
cttcgcagtcggggtcgttgt

SEQ ID NO: 7043 - RNA, 21 nt, synthetic construct
  misc_feature 1..21: note = Synthetic
  source 1..21: mol_type = other RNA
cttcgcatcttcgctgggcca

SEQ ID NO: 7044 - RNA, 21 nt, synthetic construct
  misc_feature 1..21: note = Synthetic
  source 1..21: mol_type = other RNA
cttcgccaggagggcccagga

SEQ ID NO: 7045 - RNA, 21 nt, synthetic construct
  misc_feature 1..21: note = Synthetic
  source 1..21: mol_type = other RNA
cttcgctgggccaccagctgg

SEQ ID NO: 7046 - RNA, 21 nt, synthetic construct
  misc_feature 1..21: note = Synthetic
  source 1..21: mol_type = other RNA
cttcgtgtgggggtccagctg

SEQ ID NO: 7047 - RNA, 21 nt, synthetic construct
  misc_feature 1..21: note = Synthetic
  source 1..21: mol_type = other RNA
cttcgttgatgatatctgtcc

SEQ ID NO: 7048 - RNA, 21 nt, synthetic construct
  misc_feature 1..21: note = Synthetic
  source 1..21: mol_type = other RNA
cttctatacagtggtttaaaa

SEQ ID NO: 7049 - RNA, 21 nt, synthetic construct
  misc_feature 1..21: note = Synthetic
  source 1..21: mol_type = other RNA
cttctcatttcctctgccagc

SEQ ID NO: 7050 - RNA, 21 nt, synthetic construct
  misc_feature 1..21: note = Synthetic
  source 1..21: mol_type = other RNA
cttctctgggcctgacatccc

SEQ ID NO: 7051 - RNA, 21 nt, synthetic construct
  misc_feature 1..21: note = Synthetic
  source 1..21: mol_type = other RNA
cttctctgtctttgaataaaa

SEQ ID NO: 7052 - RNA, 21 nt, synthetic construct
  misc_feature 1..21: note = Synthetic
  source 1..21: mol_type = other RNA
cttctgatagacggggttgtc

SEQ ID NO: 7053 - RNA, 21 nt, synthetic construct
  misc_feature 1..21: note = Synthetic
  source 1..21: mol_type = other RNA
cttcttctcatttcctctgcc

SEQ ID NO: 7054 - RNA, 21 nt, synthetic construct
  misc_feature 1..21: note = Synthetic
  source 1..21: mol_type = other RNA
cttgaacttgttgggtccctc

SEQ ID NO: 7055 - RNA, 21 nt, synthetic construct
  misc_feature 1..21: note = Synthetic
  source 1..21: mol_type = other RNA
cttgagatggagtgaagtttg

SEQ ID NO: 7056 - RNA, 21 nt, synthetic construct
  misc_feature 1..21: note = Synthetic
  source 1..21: mol_type = other RNA
cttgagggtggccgggggccc

SEQ ID NO: 7057 - RNA, 21 nt, synthetic construct
  misc_feature 1..21: note = Synthetic
  source 1..21: mol_type = other RNA
cttgatcggggctggtggggc

SEQ ID NO: 7058 - RNA, 21 nt, synthetic construct
  misc_feature 1..21: note = Synthetic
  source 1..21: mol_type = other RNA
cttgatcttggcgggagttcc

SEQ ID NO: 7059 - RNA, 21 nt, synthetic construct
  misc_feature 1..21: note = Synthetic
  source 1..21: mol_type = other RNA
cttgcaggccttcgtgtgggg

SEQ ID NO: 7060 - RNA, 21 nt, synthetic construct
  misc_feature 1..21: note = Synthetic
  source 1..21: mol_type = other RNA
cttgcagtcatattcccggtc

SEQ ID NO: 7061 - RNA, 21 nt, synthetic construct
  misc_feature 1..21: note = Synthetic
  source 1..21: mol_type = other RNA
cttgcagtcggggccaccatc

SEQ ID NO: 7062 - RNA, 21 nt, synthetic construct
  misc_feature 1..21: note = Synthetic
  source 1..21: mol_type = other RNA
cttgcatagaagaggtaaaca

SEQ ID NO: 7063 - RNA, 21 nt, synthetic construct
  misc_feature 1..21: note = Synthetic
  source 1..21: mol_type = other RNA
cttgctcgtctgagccgttgt

SEQ ID NO: 7064 - RNA, 21 nt, synthetic construct
  misc_feature 1..21: note = Synthetic
  source 1..21: mol_type = other RNA
cttgcttctctgggcctgaca

SEQ ID NO: 7065 - RNA, 21 nt, synthetic construct
  misc_feature 1..21: note = Synthetic
  source 1..21: mol_type = other RNA
cttggaacacgtaaagacccc

SEQ ID NO: 7066 - RNA, 21 nt, synthetic construct
  misc_feature 1..21: note = Synthetic
  source 1..21: mol_type = other RNA
cttggagccgttctccctgaa

SEQ ID NO: 7067 - RNA, 21 nt, synthetic construct
  misc_feature 1..21: note = Synthetic
  source 1..21: mol_type = other RNA
cttggaggcatttgcatagaa

SEQ ID NO: 7068 - RNA, 21 nt, synthetic construct
  misc_feature 1..21: note = Synthetic
  source 1..21: mol_type = other RNA
cttggcactggaactcgtttc

SEQ ID NO: 7069 - RNA, 21 nt, synthetic construct
  misc_feature 1..21: note = Synthetic
  source 1..21: mol_type = other RNA
cttggccatcgcacctccaga

SEQ ID NO: 7070 - RNA, 21 nt, synthetic construct
  misc_feature 1..21: note = Synthetic
  source 1..21: mol_type = other RNA
cttggcgggagttccccagtc

SEQ ID NO: 7071 - RNA, 21 nt, synthetic construct
  misc_feature 1..21: note = Synthetic
  source 1..21: mol_type = other RNA
cttggctgggtgaggttgtgg

SEQ ID NO: 7072 - RNA, 21 nt, synthetic construct
  misc_feature 1..21: note = Synthetic
  source 1..21: mol_type = other RNA
cttggcttggagccgttctcc

SEQ ID NO: 7073 - RNA, 21 nt, synthetic construct
  misc_feature 1..21: note = Synthetic
  source 1..21: mol_type = other RNA
cttgggcgagtgggggttgat

SEQ ID NO: 7074 - RNA, 21 nt, synthetic construct
  misc_feature 1..21: note = Synthetic
  source 1..21: mol_type = other RNA
cttgggggagcacgtctcctg

SEQ ID NO: 7075 - RNA, 21 nt, synthetic construct
  misc_feature 1..21: note = Synthetic
  source 1..21: mol_type = other RNA
cttggggggacagccttgctc

SEQ ID NO: 7076 - RNA, 21 nt, synthetic construct
  misc_feature 1..21: note = Synthetic
  source 1..21: mol_type = other RNA
cttggtatccgcaacagagac

SEQ ID NO: 7077 - RNA, 21 nt, synthetic construct
  misc_feature 1..21: note = Synthetic
  source 1..21: mol_type = other RNA
cttggtgagacattgtcacta

SEQ ID NO: 7078 - RNA, 21 nt, synthetic construct
  misc_feature 1..21: note = Synthetic
  source 1..21: mol_type = other RNA
cttgtagccaccctccaggtt

SEQ ID NO: 7079 - RNA, 21 nt, synthetic construct
  misc_feature 1..21: note = Synthetic
  source 1..21: mol_type = other RNA
cttgtaggagatgcatttccc

SEQ ID NO: 7080 - RNA, 21 nt, synthetic construct
  misc_feature 1..21: note = Synthetic
  source 1..21: mol_type = other RNA
cttgtcgtcgcctttgtgaca

SEQ ID NO: 7081 - RNA, 21 nt, synthetic construct
  misc_feature 1..21: note = Synthetic
  source 1..21: mol_type = other RNA
cttgtgacatcttcacgcggg

SEQ ID NO: 7082 - RNA, 21 nt, synthetic construct
  misc_feature 1..21: note = Synthetic
  source 1..21: mol_type = other RNA
cttgttgggtccctcgcagag

SEQ ID NO: 7083 - RNA, 21 nt, synthetic construct
  misc_feature 1..21: note = Synthetic
  source 1..21: mol_type = other RNA
ctttagcctgacggtggatgt

SEQ ID NO: 7084 - RNA, 21 nt, synthetic construct
  misc_feature 1..21: note = Synthetic
  source 1..21: mol_type = other RNA
ctttcatcttccatgtttgag

SEQ ID NO: 7085 - RNA, 21 nt, synthetic construct
  misc_feature 1..21: note = Synthetic
  source 1..21: mol_type = other RNA
ctttccctggcctgggatccc

SEQ ID NO: 7086 - RNA, 21 nt, synthetic construct
  misc_feature 1..21: note = Synthetic
  source 1..21: mol_type = other RNA
ctttcctggcttaaggaaggt

SEQ ID NO: 7087 - RNA, 21 nt, synthetic construct
  misc_feature 1..21: note = Synthetic
  source 1..21: mol_type = other RNA
ctttcgcatctgtcgcccacg

SEQ ID NO: 7088 - RNA, 21 nt, synthetic construct
  misc_feature 1..21: note = Synthetic
  source 1..21: mol_type = other RNA
ctttcgcatctgtcgcccact

SEQ ID NO: 7089 - RNA, 21 nt, synthetic construct
  misc_feature 1..21: note = Synthetic
  source 1..21: mol_type = other RNA
ctttcttgatcttggcgggag

SEQ ID NO: 7090 - RNA, 21 nt, synthetic construct
  misc_feature 1..21: note = Synthetic
  source 1..21: mol_type = other RNA
ctttgaagtcccggtcaacct

SEQ ID NO: 7091 - RNA, 21 nt, synthetic construct
  misc_feature 1..21: note = Synthetic
  source 1..21: mol_type = other RNA
ctttgaataaaacaaggccgg

SEQ ID NO: 7092 - RNA, 21 nt, synthetic construct
  misc_feature 1..21: note = Synthetic
  source 1..21: mol_type = other RNA
ctttgatgggttcatctgacc

SEQ ID NO: 7093 - RNA, 21 nt, synthetic construct
  misc_feature 1..21: note = Synthetic
  source 1..21: mol_type = other RNA
ctttggtcttctctgtctttg

SEQ ID NO: 7094 - RNA, 21 nt, synthetic construct
  misc_feature 1..21: note = Synthetic
  source 1..21: mol_type = other RNA
ctttgtacataaagaagaggc

SEQ ID NO: 7095 - RNA, 21 nt, synthetic construct
  misc_feature 1..21: note = Synthetic
  source 1..21: mol_type = other RNA
ctttgtccagggtgatgcatt

SEQ ID NO: 7096 - RNA, 21 nt, synthetic construct
  misc_feature 1..21: note = Synthetic
  source 1..21: mol_type = other RNA
ctttgtcctcaaagacggcca

SEQ ID NO: 7097 - RNA, 21 nt, synthetic construct
  misc_feature 1..21: note = Synthetic
  source 1..21: mol_type = other RNA
ctttgtgacaggaaccgcgga

SEQ ID NO: 7098 - RNA, 21 nt, synthetic construct
  misc_feature 1..21: note = Synthetic
  source 1..21: mol_type = other RNA
ctttgttgctcaggcctggtc

SEQ ID NO: 7099 - RNA, 21 nt, synthetic construct
  misc_feature 1..21: note = Synthetic
  source 1..21: mol_type = other RNA
cttttcatcctccaagatggt

SEQ ID NO: 7100 - RNA, 21 nt, synthetic construct
  misc_feature 1..21: note = Synthetic
  source 1..21: mol_type = other RNA
ctttttggtttttgtagagat

SEQ ID NO: 7101 - RNA, 21 nt, synthetic construct
  misc_feature 1..21: note = Synthetic
  source 1..21: mol_type = other RNA
gaaaacagtgcaaaataataa

SEQ ID NO: 7102 - RNA, 21 nt, synthetic construct
  misc_feature 1..21: note = Synthetic
  source 1..21: mol_type = other RNA
gaaaatggcttcgttgatgat

SEQ ID NO: 7103 - RNA, 21 nt, synthetic construct
  misc_feature 1..21: note = Synthetic
  source 1..21: mol_type = other RNA
gaaaccaaaatcccaacccaa

SEQ ID NO: 7104 - RNA, 21 nt, synthetic construct
  misc_feature 1..21: note = Synthetic
  source 1..21: mol_type = other RNA
gaaaccagaaaggcttatcac

SEQ ID NO: 7105 - RNA, 21 nt, synthetic construct
  misc_feature 1..21: note = Synthetic
  source 1..21: mol_type = other RNA
gaaaccctggcttcccgcgat

SEQ ID NO: 7106 - RNA, 21 nt, synthetic construct
  misc_feature 1..21: note = Synthetic
  source 1..21: mol_type = other RNA
gaaaccggggacttcgccagg

SEQ ID NO: 7107 - RNA, 21 nt, synthetic construct
  misc_feature 1..21: note = Synthetic
  source 1..21: mol_type = other RNA
gaaactcaaaacttcctggag

SEQ ID NO: 7108 - RNA, 21 nt, synthetic construct
  misc_feature 1..21: note = Synthetic
  source 1..21: mol_type = other RNA
gaaactcgtcctgggagcacg

SEQ ID NO: 7109 - RNA, 21 nt, synthetic construct
  misc_feature 1..21: note = Synthetic
  source 1..21: mol_type = other RNA
gaaagaacctgaagtcccgtc

SEQ ID NO: 7110 - RNA, 21 nt, synthetic construct
  misc_feature 1..21: note = Synthetic
  source 1..21: mol_type = other RNA
gaaagacactgggtgggtcat

SEQ ID NO: 7111 - RNA, 21 nt, synthetic construct
  misc_feature 1..21: note = Synthetic
  source 1..21: mol_type = other RNA
gaaagcagtggcataatcata

SEQ ID NO: 7112 - RNA, 21 nt, synthetic construct
  misc_feature 1..21: note = Synthetic
  source 1..21: mol_type = other RNA
gaaagccacttgcttctctgg

SEQ ID NO: 7113 - RNA, 21 nt, synthetic construct
  misc_feature 1..21: note = Synthetic
  source 1..21: mol_type = other RNA
gaaaggaagaaaccaaaatcc

SEQ ID NO: 7114 - RNA, 21 nt, synthetic construct
  misc_feature 1..21: note = Synthetic
  source 1..21: mol_type = other RNA
gaaaggcttatcacggttccc

SEQ ID NO: 7115 - RNA, 21 nt, synthetic construct
  misc_feature 1..21: note = Synthetic
  source 1..21: mol_type = other RNA
gaaagtgcaaggagaccacgg

SEQ ID NO: 7116 - RNA, 21 nt, synthetic construct
  misc_feature 1..21: note = Synthetic
  source 1..21: mol_type = other RNA
gaaatagggtcttcatctgtt

SEQ ID NO: 7117 - RNA, 21 nt, synthetic construct
  misc_feature 1..21: note = Synthetic
  source 1..21: mol_type = other RNA
gaaatggaggtgtcatcctgg

SEQ ID NO: 7118 - RNA, 21 nt, synthetic construct
  misc_feature 1..21: note = Synthetic
  source 1..21: mol_type = other RNA
gaaatttaattgatcacagta

SEQ ID NO: 7119 - RNA, 21 nt, synthetic construct
  misc_feature 1..21: note = Synthetic
  source 1..21: mol_type = other RNA
gaacaaatacagcaaccaggg

SEQ ID NO: 7120 - RNA, 21 nt, synthetic construct
  misc_feature 1..21: note = Synthetic
  source 1..21: mol_type = other RNA
gaacacgtaaagacccctaca

SEQ ID NO: 7121 - RNA, 21 nt, synthetic construct
  misc_feature 1..21: note = Synthetic
  source 1..21: mol_type = other RNA
gaacagccgccgttgttgtcc

SEQ ID NO: 7122 - RNA, 21 nt, synthetic construct
  misc_feature 1..21: note = Synthetic
  source 1..21: mol_type = other RNA
gaacaggatccaccacgatgg

SEQ ID NO: 7123 - RNA, 21 nt, synthetic construct
  misc_feature 1..21: note = Synthetic
  source 1..21: mol_type = other RNA
gaacaggtcgggtggttgtgt

SEQ ID NO: 7124 - RNA, 21 nt, synthetic construct
  misc_feature 1..21: note = Synthetic
  source 1..21: mol_type = other RNA
gaaccatatcctctggggaca

SEQ ID NO: 7125 - RNA, 21 nt, synthetic construct
  misc_feature 1..21: note = Synthetic
  source 1..21: mol_type = other RNA
gaaccgaggccttgagggtgg

SEQ ID NO: 7126 - RNA, 21 nt, synthetic construct
  misc_feature 1..21: note = Synthetic
  source 1..21: mol_type = other RNA
gaaccgcggaggaacgccagg

SEQ ID NO: 7127 - RNA, 21 nt, synthetic construct
  misc_feature 1..21: note = Synthetic
  source 1..21: mol_type = other RNA
gaacctgaagtcccgtcaaac

SEQ ID NO: 7128 - RNA, 21 nt, synthetic construct
  misc_feature 1..21: note = Synthetic
  source 1..21: mol_type = other RNA
gaacctgtgaggcggttggca

SEQ ID NO: 7129 - RNA, 21 nt, synthetic construct
  misc_feature 1..21: note = Synthetic
  source 1..21: mol_type = other RNA
gaactcaagtgatccagctca

SEQ ID NO: 7130 - RNA, 21 nt, synthetic construct
  misc_feature 1..21: note = Synthetic
  source 1..21: mol_type = other RNA
gaactcgaaggccgagcaggg

SEQ ID NO: 7131 - RNA, 21 nt, synthetic construct
  misc_feature 1..21: note = Synthetic
  source 1..21: mol_type = other RNA
gaactcgtttctttcgcatct

SEQ ID NO: 7132 - RNA, 21 nt, synthetic construct
  misc_feature 1..21: note = Synthetic
  source 1..21: mol_type = other RNA
gaactgagaaagtgcaaggag

SEQ ID NO: 7133 - RNA, 21 nt, synthetic construct
  misc_feature 1..21: note = Synthetic
  source 1..21: mol_type = other RNA
gaactgaggaatgcagcggtt

SEQ ID NO: 7134 - RNA, 21 nt, synthetic construct
  misc_feature 1..21: note = Synthetic
  source 1..21: mol_type = other RNA
gaactgccgagagatgcactt

SEQ ID NO: 7135 - RNA, 21 nt, synthetic construct
  misc_feature 1..21: note = Synthetic
  source 1..21: mol_type = other RNA
gaacttgatcggggctggtgg

SEQ ID NO: 7136 - RNA, 21 nt, synthetic construct
  misc_feature 1..21: note = Synthetic
  source 1..21: mol_type = other RNA
gaacttgttgggtccctcgca

SEQ ID NO: 7137 - RNA, 21 nt, synthetic construct
  misc_feature 1..21: note = Synthetic
  source 1..21: mol_type = other RNA
gaagaaaccaaaatcccaacc

SEQ ID NO: 7138 - RNA, 21 nt, synthetic construct
  misc_feature 1..21: note = Synthetic
  source 1..21: mol_type = other RNA
gaagaagaggtaggcgatgga

SEQ ID NO: 7139 - RNA, 21 nt, synthetic construct
  misc_feature 1..21: note = Synthetic
  source 1..21: mol_type = other RNA
gaagacccccaggcaaaggaa

SEQ ID NO: 7140 - RNA, 21 nt, synthetic construct
  misc_feature 1..21: note = Synthetic
  source 1..21: mol_type = other RNA
gaagacgaggagcacgatggg

SEQ ID NO: 7141 - RNA, 21 nt, synthetic construct
  misc_feature 1..21: note = Synthetic
  source 1..21: mol_type = other RNA
gaagacgaggagcactgtagg

SEQ ID NO: 7142 - RNA, 21 nt, synthetic construct
  misc_feature 1..21: note = Synthetic
  source 1..21: mol_type = other RNA
gaagagaaccatatcctctgg

SEQ ID NO: 7143 - RNA, 21 nt, synthetic construct
  misc_feature 1..21: note = Synthetic
  source 1..21: mol_type = other RNA
gaagagacgccgtgggctctg

SEQ ID NO: 7144 - RNA, 21 nt, synthetic construct
  misc_feature 1..21: note = Synthetic
  source 1..21: mol_type = other RNA
gaagaggcatttcagaggcaa

SEQ ID NO: 7145 - RNA, 21 nt, synthetic construct
  misc_feature 1..21: note = Synthetic
  source 1..21: mol_type = other RNA
gaagaggtaaacacgttgact

SEQ ID NO: 7146 - RNA, 21 nt, synthetic construct
  misc_feature 1..21: note = Synthetic
  source 1..21: mol_type = other RNA
gaagaggtaggcgatggagcc

SEQ ID NO: 7147 - RNA, 21 nt, synthetic construct
  misc_feature 1..21: note = Synthetic
  source 1..21: mol_type = other RNA
gaagatctcggctgcagacca

SEQ ID NO: 7148 - RNA, 21 nt, synthetic construct
  misc_feature 1..21: note = Synthetic
  source 1..21: mol_type = other RNA
gaagcactaggtgggcggaca

SEQ ID NO: 7149 - RNA, 21 nt, synthetic construct
  misc_feature 1..21: note = Synthetic
  source 1..21: mol_type = other RNA
gaagccactcatacatacaac

SEQ ID NO: 7150 - RNA, 21 nt, synthetic construct
  misc_feature 1..21: note = Synthetic
  source 1..21: mol_type = other RNA
gaagccatgaacaggatccac

SEQ ID NO: 7151 - RNA, 21 nt, synthetic construct
  misc_feature 1..21: note = Synthetic
  source 1..21: mol_type = other RNA
gaagccgtcggggcacaggca

SEQ ID NO: 7152 - RNA, 21 nt, synthetic construct
  misc_feature 1..21: note = Synthetic
  source 1..21: mol_type = other RNA
gaagcctgttctgcctcccag

SEQ ID NO: 7153 - RNA, 21 nt, synthetic construct
  misc_feature 1..21: note = Synthetic
  source 1..21: mol_type = other RNA
gaagccttcctcacactggca

SEQ ID NO: 7154 - RNA, 21 nt, synthetic construct
  misc_feature 1..21: note = Synthetic
  source 1..21: mol_type = other RNA
gaagctggcgggaccacaggt

SEQ ID NO: 7155 - RNA, 21 nt, synthetic construct
  misc_feature 1..21: note = Synthetic
  source 1..21: mol_type = other RNA
gaaggaagacccccaggcaaa

SEQ ID NO: 7156 - RNA, 21 nt, synthetic construct
  misc_feature 1..21: note = Synthetic
  source 1..21: mol_type = other RNA
gaaggccgagcaggggctact

SEQ ID NO: 7157 - RNA, 21 nt, synthetic construct
  misc_feature 1..21: note = Synthetic
  source 1..21: mol_type = other RNA
gaaggggtgggccagcctctt

SEQ ID NO: 7158 - RNA, 21 nt, synthetic construct
  misc_feature 1..21: note = Synthetic
  source 1..21: mol_type = other RNA
gaagggttctgggcagggacg

SEQ ID NO: 7159 - RNA, 21 nt, synthetic construct
  misc_feature 1..21: note = Synthetic
  source 1..21: mol_type = other RNA
gaaggtacaaacccacctcga

SEQ ID NO: 7160 - RNA, 21 nt, synthetic construct
  misc_feature 1..21: note = Synthetic
  source 1..21: mol_type = other RNA
gaagtccccggatttgcaggt

SEQ ID NO: 7161 - RNA, 21 nt, synthetic construct
  misc_feature 1..21: note = Synthetic
  source 1..21: mol_type = other RNA
gaagtcccggtcaacctgccc

SEQ ID NO: 7162 - RNA, 21 nt, synthetic construct
  misc_feature 1..21: note = Synthetic
  source 1..21: mol_type = other RNA
gaagtcccgtcaaacgatcca

SEQ ID NO: 7163 - RNA, 21 nt, synthetic construct
  misc_feature 1..21: note = Synthetic
  source 1..21: mol_type = other RNA
gaagtgaatggcttggaggca

SEQ ID NO: 7164 - RNA, 21 nt, synthetic construct
  misc_feature 1..21: note = Synthetic
  source 1..21: mol_type = other RNA
gaagtggaagcactaggtggg

SEQ ID NO: 7165 - RNA, 21 nt, synthetic construct
  misc_feature 1..21: note = Synthetic
  source 1..21: mol_type = other RNA
gaagtggcatcatttggtgaa

SEQ ID NO: 7166 - RNA, 21 nt, synthetic construct
  misc_feature 1..21: note = Synthetic
  source 1..21: mol_type = other RNA
gaagtgggtaggggtcgggag

SEQ ID NO: 7167 - RNA, 21 nt, synthetic construct
  misc_feature 1..21: note = Synthetic
  source 1..21: mol_type = other RNA
gaagtttggagtcaacccagt

SEQ ID NO: 7168 - RNA, 21 nt, synthetic construct
  misc_feature 1..21: note = Synthetic
  source 1..21: mol_type = other RNA
gaataaaacaaggccggcgag

SEQ ID NO: 7169 - RNA, 21 nt, synthetic construct
  misc_feature 1..21: note = Synthetic
  source 1..21: mol_type = other RNA
gaataaatatataaaacaaag

SEQ ID NO: 7170 - RNA, 21 nt, synthetic construct
  misc_feature 1..21: note = Synthetic
  source 1..21: mol_type = other RNA
gaataacgttttcctcttcac

SEQ ID NO: 7171 - RNA, 21 nt, synthetic construct
  misc_feature 1..21: note = Synthetic
  source 1..21: mol_type = other RNA
gaatagtcactgaacaaatac

SEQ ID NO: 7172 - RNA, 21 nt, synthetic construct
  misc_feature 1..21: note = Synthetic
  source 1..21: mol_type = other RNA
gaatccctttcctggcttaag

SEQ ID NO: 7173 - RNA, 21 nt, synthetic construct
  misc_feature 1..21: note = Synthetic
  source 1..21: mol_type = other RNA
gaatgagtttggtctcggtgc

SEQ ID NO: 7174 - RNA, 21 nt, synthetic construct
  misc_feature 1..21: note = Synthetic
  source 1..21: mol_type = other RNA
gaatgcagcggttgacacggc

SEQ ID NO: 7175 - RNA, 21 nt, synthetic construct
  misc_feature 1..21: note = Synthetic
  source 1..21: mol_type = other RNA
gaatggaagtgggtaggggtc

SEQ ID NO: 7176 - RNA, 21 nt, synthetic construct
  misc_feature 1..21: note = Synthetic
  source 1..21: mol_type = other RNA
gaatggcttggaggcatttgc

SEQ ID NO: 7177 - RNA, 21 nt, synthetic construct
  misc_feature 1..21: note = Synthetic
  source 1..21: mol_type = other RNA
gaatgttttcagtcaccagcg

SEQ ID NO: 7178 - RNA, 21 nt, synthetic construct
  misc_feature 1..21: note = Synthetic
  source 1..21: mol_type = other RNA
gaattcgtcagggcgacaggt

SEQ ID NO: 7179 - RNA, 21 nt, synthetic construct
  misc_feature 1..21: note = Synthetic
  source 1..21: mol_type = other RNA
gacaagattggggaagtgaat

SEQ ID NO: 7180 - RNA, 21 nt, synthetic construct
  misc_feature 1..21: note = Synthetic
  source 1..21: mol_type = other RNA
gacaagcacgtctcctgggac

SEQ ID NO: 7181 - RNA, 21 nt, synthetic construct
  misc_feature 1..21: note = Synthetic
  source 1..21: mol_type = other RNA
gacaaggtggggacggaggtg

SEQ ID NO: 7182 - RNA, 21 nt, synthetic construct
  misc_feature 1..21: note = Synthetic
  source 1..21: mol_type = other RNA
gacaatggacagagccctcac

SEQ ID NO: 7183 - RNA, 21 nt, synthetic construct
  misc_feature 1..21: note = Synthetic
  source 1..21: mol_type = other RNA
gacaatggcagttctcgatat

SEQ ID NO: 7184 - RNA, 21 nt, synthetic construct
  misc_feature 1..21: note = Synthetic
  source 1..21: mol_type = other RNA
gacaattgccaatcccttgtg

SEQ ID NO: 7185 - RNA, 21 nt, synthetic construct
  misc_feature 1..21: note = Synthetic
  source 1..21: mol_type = other RNA
gacacagtgttttgtccctgg

SEQ ID NO: 7186 - RNA, 21 nt, synthetic construct
  misc_feature 1..21: note = Synthetic
  source 1..21: mol_type = other RNA
gacacccatctcccagaagcc

SEQ ID NO: 7187 - RNA, 21 nt, synthetic construct
  misc_feature 1..21: note = Synthetic
  source 1..21: mol_type = other RNA
gacacggcccccacagctgaa

SEQ ID NO: 7188 - RNA, 21 nt, synthetic construct
  misc_feature 1..21: note = Synthetic
  source 1..21: mol_type = other RNA
gacacgggctttccctggcct

SEQ ID NO: 7189 - RNA, 21 nt, synthetic construct
  misc_feature 1..21: note = Synthetic
  source 1..21: mol_type = other RNA
gacactcatcgatatcgcact

SEQ ID NO: 7190 - RNA, 21 nt, synthetic construct
  misc_feature 1..21: note = Synthetic
  source 1..21: mol_type = other RNA
gacactcatcgatatcttcgc

SEQ ID NO: 7191 - RNA, 21 nt, synthetic construct
  misc_feature 1..21: note = Synthetic
  source 1..21: mol_type = other RNA
gacactgggtgggtcatgatt

SEQ ID NO: 7192 - RNA, 21 nt, synthetic construct
  misc_feature 1..21: note = Synthetic
  source 1..21: mol_type = other RNA
gacacttgaacttgttgggtc

SEQ ID NO: 7193 - RNA, 21 nt, synthetic construct
  misc_feature 1..21: note = Synthetic
  source 1..21: mol_type = other RNA
gacagaaaacagtgcaaaata

SEQ ID NO: 7194 - RNA, 21 nt, synthetic construct
  misc_feature 1..21: note = Synthetic
  source 1..21: mol_type = other RNA
gacagacaagcacgtctcctg

SEQ ID NO: 7195 - RNA, 21 nt, synthetic construct
  misc_feature 1..21: note = Synthetic
  source 1..21: mol_type = other RNA
gacagagccctcacgctactg

SEQ ID NO: 7196 - RNA, 21 nt, synthetic construct
  misc_feature 1..21: note = Synthetic
  source 1..21: mol_type = other RNA
gacagagtcggtccagtagat

SEQ ID NO: 7197 - RNA, 21 nt, synthetic construct
  misc_feature 1..21: note = Synthetic
  source 1..21: mol_type = other RNA
gacagccacacctgggtgcag

SEQ ID NO: 7198 - RNA, 21 nt, synthetic construct
  misc_feature 1..21: note = Synthetic
  source 1..21: mol_type = other RNA
gacagcctcaaatgcctgagc

SEQ ID NO: 7199 - RNA, 21 nt, synthetic construct
  misc_feature 1..21: note = Synthetic
  source 1..21: mol_type = other RNA
gacagccttgctcgtctgagc

SEQ ID NO: 7200 - RNA, 21 nt, synthetic construct
  misc_feature 1..21: note = Synthetic
  source 1..21: mol_type = other RNA
gacaggaaccgcggaggaacg

SEQ ID NO: 7201 - RNA, 21 nt, synthetic construct
  misc_feature 1..21: note = Synthetic
  source 1..21: mol_type = other RNA
gacagggcaaaggctaacctg

SEQ ID NO: 7202 - RNA, 21 nt, synthetic construct
  misc_feature 1..21: note = Synthetic
  source 1..21: mol_type = other RNA
gacaggtcagaccagtagatt

SEQ ID NO: 7203 - RNA, 21 nt, synthetic construct
  misc_feature 1..21: note = Synthetic
  source 1..21: mol_type = other RNA
gacaggtggccacagcgcagt

SEQ ID NO: 7204 - RNA, 21 nt, synthetic construct
  misc_feature 1..21: note = Synthetic
  source 1..21: mol_type = other RNA
gacaggtggccacaggacagc

SEQ ID NO: 7205 - RNA, 21 nt, synthetic construct
  misc_feature 1..21: note = Synthetic
  source 1..21: mol_type = other RNA
gacagtaggttttcagccaac

SEQ ID NO: 7206 - RNA, 21 nt, synthetic construct
  misc_feature 1..21: note = Synthetic
  source 1..21: mol_type = other RNA
gacagtgcccaggacagagtc

SEQ ID NO: 7207 - RNA, 21 nt, synthetic construct
  misc_feature 1..21: note = Synthetic
  source 1..21: mol_type = other RNA
gacataaagacgacaatggca

SEQ ID NO: 7208 - RNA, 21 nt, synthetic construct
  misc_feature 1..21: note = Synthetic
  source 1..21: mol_type = other RNA
gacatcagtgcaacagtaaca

SEQ ID NO: 7209 - RNA, 21 nt, synthetic construct
  misc_feature 1..21: note = Synthetic
  source 1..21: mol_type = other RNA
gacatcattctcccaaaaagc

SEQ ID NO: 7210 - RNA, 21 nt, synthetic construct
  misc_feature 1..21: note = Synthetic
  source 1..21: mol_type = other RNA
gacatcccctcccctttcatc

SEQ ID NO: 7211 - RNA, 21 nt, synthetic construct
  misc_feature 1..21: note = Synthetic
  source 1..21: mol_type = other RNA
gacatcgatgcttgagatgga

SEQ ID NO: 7212 - RNA, 21 nt, synthetic construct
  misc_feature 1..21: note = Synthetic
  source 1..21: mol_type = other RNA
gacatcggaacctgtgaggcg

SEQ ID NO: 7213 - RNA, 21 nt, synthetic construct
  misc_feature 1..21: note = Synthetic
  source 1..21: mol_type = other RNA
gacatcttcacgcgggagtct

SEQ ID NO: 7214 - RNA, 21 nt, synthetic construct
  misc_feature 1..21: note = Synthetic
  source 1..21: mol_type = other RNA
gacattcaggctacaaaaacc

SEQ ID NO: 7215 - RNA, 21 nt, synthetic construct
  misc_feature 1..21: note = Synthetic
  source 1..21: mol_type = other RNA
gacattgtcactatctccacc

SEQ ID NO: 7216 - RNA, 21 nt, synthetic construct
  misc_feature 1..21: note = Synthetic
  source 1..21: mol_type = other RNA
gaccaaggaggggcggggaga

SEQ ID NO: 7217 - RNA, 21 nt, synthetic construct
  misc_feature 1..21: note = Synthetic
  source 1..21: mol_type = other RNA
gaccacaggtgagcaccgggc

SEQ ID NO: 7218 - RNA, 21 nt, synthetic construct
  misc_feature 1..21: note = Synthetic
  source 1..21: mol_type = other RNA
gaccacgggaatggaagtggg

SEQ ID NO: 7219 - RNA, 21 nt, synthetic construct
  misc_feature 1..21: note = Synthetic
  source 1..21: mol_type = other RNA
gaccacgttcctcaggttggg

SEQ ID NO: 7220 - RNA, 21 nt, synthetic construct
  misc_feature 1..21: note = Synthetic
  source 1..21: mol_type = other RNA
gaccagagacccagctccgtg

SEQ ID NO: 7221 - RNA, 21 nt, synthetic construct
  misc_feature 1..21: note = Synthetic
  source 1..21: mol_type = other RNA
gaccagtagattctattgctg

SEQ ID NO: 7222 - RNA, 21 nt, synthetic construct
  misc_feature 1..21: note = Synthetic
  source 1..21: mol_type = other RNA
gaccagtcccggcagtctcta

SEQ ID NO: 7223 - RNA, 21 nt, synthetic construct
  misc_feature 1..21: note = Synthetic
  source 1..21: mol_type = other RNA
gaccagtgactcaggctctgc

SEQ ID NO: 7224 - RNA, 21 nt, synthetic construct
  misc_feature 1..21: note = Synthetic
  source 1..21: mol_type = other RNA
gaccatcgaggggtagctgta

SEQ ID NO: 7225 - RNA, 21 nt, synthetic construct
  misc_feature 1..21: note = Synthetic
  source 1..21: mol_type = other RNA
gaccatctgtctcgaggggta

SEQ ID NO: 7226 - RNA, 21 nt, synthetic construct
  misc_feature 1..21: note = Synthetic
  source 1..21: mol_type = other RNA
gacccacttgtaggagatgca

SEQ ID NO: 7227 - RNA, 21 nt, synthetic construct
  misc_feature 1..21: note = Synthetic
  source 1..21: mol_type = other RNA
gacccagctccgtggcgatgg

SEQ ID NO: 7228 - RNA, 21 nt, synthetic construct
  misc_feature 1..21: note = Synthetic
  source 1..21: mol_type = other RNA
gacccccaggcaaaggaagac

SEQ ID NO: 7229 - RNA, 21 nt, synthetic construct
  misc_feature 1..21: note = Synthetic
  source 1..21: mol_type = other RNA
gacccctacagcgctgcggcc

SEQ ID NO: 7230 - RNA, 21 nt, synthetic construct
  misc_feature 1..21: note = Synthetic
  source 1..21: mol_type = other RNA
gacccggatcacgacctgctg

SEQ ID NO: 7231 - RNA, 21 nt, synthetic construct
  misc_feature 1..21: note = Synthetic
  source 1..21: mol_type = other RNA
gacccgggacttgtcgtcgcc

SEQ ID NO: 7232 - RNA, 21 nt, synthetic construct
  misc_feature 1..21: note = Synthetic
  source 1..21: mol_type = other RNA
gacctcatcctctgtggtctt

SEQ ID NO: 7233 - RNA, 21 nt, synthetic construct
  misc_feature 1..21: note = Synthetic
  source 1..21: mol_type = other RNA
gacctcatgatccacccgcct

SEQ ID NO: 7234 - RNA, 21 nt, synthetic construct
  misc_feature 1..21: note = Synthetic
  source 1..21: mol_type = other RNA
gacctcgtgccggttggtgaa

SEQ ID NO: 7235 - RNA, 21 nt, synthetic construct
  misc_feature 1..21: note = Synthetic
  source 1..21: mol_type = other RNA
gacctgctgtgtcctagctgg

SEQ ID NO: 7236 - RNA, 21 nt, synthetic construct
  misc_feature 1..21: note = Synthetic
  source 1..21: mol_type = other RNA
gacctttagcctgacggtgga

SEQ ID NO: 7237 - RNA, 21 nt, synthetic construct
  misc_feature 1..21: note = Synthetic
  source 1..21: mol_type = other RNA
gacgaactgccgagagatgca

SEQ ID NO: 7238 - RNA, 21 nt, synthetic construct
  misc_feature 1..21: note = Synthetic
  source 1..21: mol_type = other RNA
gacgacaatggcagttctcga

SEQ ID NO: 7239 - RNA, 21 nt, synthetic construct
  misc_feature 1..21: note = Synthetic
  source 1..21: mol_type = other RNA
gacgaggagcacgatggggag

SEQ ID NO: 7240 - RNA, 21 nt, synthetic construct
  misc_feature 1..21: note = Synthetic
  source 1..21: mol_type = other RNA
gacgaggagcactgtagggag

SEQ ID NO: 7241 - RNA, 21 nt, synthetic construct
  misc_feature 1..21: note = Synthetic
  source 1..21: mol_type = other RNA
gacgcatttacgtgctccgaa

SEQ ID NO: 7242 - RNA, 21 nt, synthetic construct
  misc_feature 1..21: note = Synthetic
  source 1..21: mol_type = other RNA
gacgccatgaatccctttcct

SEQ ID NO: 7243 - RNA, 21 nt, synthetic construct
  misc_feature 1..21: note = Synthetic
  source 1..21: mol_type = other RNA
gacgccgtgggctctgtcaag

SEQ ID NO: 7244 - RNA, 21 nt, synthetic construct
  misc_feature 1..21: note = Synthetic
  source 1..21: mol_type = other RNA
gacggaggctgtcactgtctc

SEQ ID NO: 7245 - RNA, 21 nt, synthetic construct
  misc_feature 1..21: note = Synthetic
  source 1..21: mol_type = other RNA
gacggaggtgtcgccacagag

SEQ ID NO: 7246 - RNA, 21 nt, synthetic construct
  misc_feature 1..21: note = Synthetic
  source 1..21: mol_type = other RNA
gacggagtctcgctctgtcgc

SEQ ID NO: 7247 - RNA, 21 nt, synthetic construct
  misc_feature 1..21: note = Synthetic
  source 1..21: mol_type = other RNA
gacggccaaggagaaggggtg

SEQ ID NO: 7248 - RNA, 21 nt, synthetic construct
  misc_feature 1..21: note = Synthetic
  source 1..21: mol_type = other RNA
gacgggactccaggcagatgt

SEQ ID NO: 7249 - RNA, 21 nt, synthetic construct
  misc_feature 1..21: note = Synthetic
  source 1..21: mol_type = other RNA
gacggggttgtcaaagttgat

SEQ ID NO: 7250 - RNA, 21 nt, synthetic construct
  misc_feature 1..21: note = Synthetic
  source 1..21: mol_type = other RNA
gacggggtttcacgtgttagc

SEQ ID NO: 7251 - RNA, 21 nt, synthetic construct
  misc_feature 1..21: note = Synthetic
  source 1..21: mol_type = other RNA
gacggtccagcgcaatttcca

SEQ ID NO: 7252 - RNA, 21 nt, synthetic construct
  misc_feature 1..21: note = Synthetic
  source 1..21: mol_type = other RNA
gacggtggatgtctcctgggt

SEQ ID NO: 7253 - RNA, 21 nt, synthetic construct
  misc_feature 1..21: note = Synthetic
  source 1..21: mol_type = other RNA
gacggtgtcataggaagagac

SEQ ID NO: 7254 - RNA, 21 nt, synthetic construct
  misc_feature 1..21: note = Synthetic
  source 1..21: mol_type = other RNA
gacgtgggaacagccgccgtt

SEQ ID NO: 7255 - RNA, 21 nt, synthetic construct
  misc_feature 1..21: note = Synthetic
  source 1..21: mol_type = other RNA
gactacaggtgcccgccacca

SEQ ID NO: 7256 - RNA, 21 nt, synthetic construct
  misc_feature 1..21: note = Synthetic
  source 1..21: mol_type = other RNA
gactcaggctctgcctctggg

SEQ ID NO: 7257 - RNA, 21 nt, synthetic construct
  misc_feature 1..21: note = Synthetic
  source 1..21: mol_type = other RNA
gactcatcagagccatcctgg

SEQ ID NO: 7258 - RNA, 21 nt, synthetic construct
  misc_feature 1..21: note = Synthetic
  source 1..21: mol_type = other RNA
gactccaggcagatgttcacg

SEQ ID NO: 7259 - RNA, 21 nt, synthetic construct
  misc_feature 1..21: note = Synthetic
  source 1..21: mol_type = other RNA
gactcctgagtttaggggttt

SEQ ID NO: 7260 - RNA, 21 nt, synthetic construct
  misc_feature 1..21: note = Synthetic
  source 1..21: mol_type = other RNA
gactcgtgtatgtcgcggagg

SEQ ID NO: 7261 - RNA, 21 nt, synthetic construct
  misc_feature 1..21: note = Synthetic
  source 1..21: mol_type = other RNA
gactgaccatcgaggggtagc

SEQ ID NO: 7262 - RNA, 21 nt, synthetic construct
  misc_feature 1..21: note = Synthetic
  source 1..21: mol_type = other RNA
gactgaccatctgtctcgagg

SEQ ID NO: 7263 - RNA, 21 nt, synthetic construct
  misc_feature 1..21: note = Synthetic
  source 1..21: mol_type = other RNA
gactgcagtggcgcaatctcg

SEQ ID NO: 7264 - RNA, 21 nt, synthetic construct
  misc_feature 1..21: note = Synthetic
  source 1..21: mol_type = other RNA
gactgcggactgcagtggcgc

SEQ ID NO: 7265 - RNA, 21 nt, synthetic construct
  misc_feature 1..21: note = Synthetic
  source 1..21: mol_type = other RNA
gactggaggatttatttattt

SEQ ID NO: 7266 - RNA, 21 nt, synthetic construct
  misc_feature 1..21: note = Synthetic
  source 1..21: mol_type = other RNA
gacttcgccaggagggcccag

SEQ ID NO: 7267 - RNA, 21 nt, synthetic construct
  misc_feature 1..21: note = Synthetic
  source 1..21: mol_type = other RNA
gacttgtcgtcgcctttgtga

SEQ ID NO: 7268 - RNA, 21 nt, synthetic construct
  misc_feature 1..21: note = Synthetic
  source 1..21: mol_type = other RNA
gactttgtccagggtgatgca

SEQ ID NO: 7269 - RNA, 21 nt, synthetic construct
  misc_feature 1..21: note = Synthetic
  source 1..21: mol_type = other RNA
gagaaactcaaaacttcctgg

SEQ ID NO: 7270 - RNA, 21 nt, synthetic construct
  misc_feature 1..21: note = Synthetic
  source 1..21: mol_type = other RNA
gagaaagtgcaaggagaccac

SEQ ID NO: 7271 - RNA, 21 nt, synthetic construct
  misc_feature 1..21: note = Synthetic
  source 1..21: mol_type = other RNA
gagaaatggaggtgtcatcct

SEQ ID NO: 7272 - RNA, 21 nt, synthetic construct
  misc_feature 1..21: note = Synthetic
  source 1..21: mol_type = other RNA
gagaaccatatcctctgggga

SEQ ID NO: 7273 - RNA, 21 nt, synthetic construct
  misc_feature 1..21: note = Synthetic
  source 1..21: mol_type = other RNA
gagaaggggtgggccagcctc

SEQ ID NO: 7274 - RNA, 21 nt, synthetic construct
  misc_feature 1..21: note = Synthetic
  source 1..21: mol_type = other RNA
gagaatagtcactgaacaaat

SEQ ID NO: 7275 - RNA, 21 nt, synthetic construct
  misc_feature 1..21: note = Synthetic
  source 1..21: mol_type = other RNA
gagacagtgcccaggacagag

SEQ ID NO: 7276 - RNA, 21 nt, synthetic construct
  misc_feature 1..21: note = Synthetic
  source 1..21: mol_type = other RNA
gagacattgtcactatctcca

SEQ ID NO: 7277 - RNA, 21 nt, synthetic construct
  misc_feature 1..21: note = Synthetic
  source 1..21: mol_type = other RNA
gagaccacgggaatggaagtg

SEQ ID NO: 7278 - RNA, 21 nt, synthetic construct
  misc_feature 1..21: note = Synthetic
  source 1..21: mol_type = other RNA
gagaccagagacccagctccg

SEQ ID NO: 7279 - RNA, 21 nt, synthetic construct
  misc_feature 1..21: note = Synthetic
  source 1..21: mol_type = other RNA
gagacccagctccgtggcgat

SEQ ID NO: 7280 - RNA, 21 nt, synthetic construct
  misc_feature 1..21: note = Synthetic
  source 1..21: mol_type = other RNA
gagacgccgtgggctctgtca

SEQ ID NO: 7281 - RNA, 21 nt, synthetic construct
  misc_feature 1..21: note = Synthetic
  source 1..21: mol_type = other RNA
gagacggagtctcgctctgtc

SEQ ID NO: 7282 - RNA, 21 nt, synthetic construct
  misc_feature 1..21: note = Synthetic
  source 1..21: mol_type = other RNA
gagacggggtttcacgtgtta

SEQ ID NO: 7283 - RNA, 21 nt, synthetic construct
  misc_feature 1..21: note = Synthetic
  source 1..21: mol_type = other RNA
gagagaaactcaaaacttcct

SEQ ID NO: 7284 - RNA, 21 nt, synthetic construct
  misc_feature 1..21: note = Synthetic
  source 1..21: mol_type = other RNA
gagagaaatggaggtgtcatc

SEQ ID NO: 7285 - RNA, 21 nt, synthetic construct
  misc_feature 1..21: note = Synthetic
  source 1..21: mol_type = other RNA
gagagatgcacttcccatcgt

SEQ ID NO: 7286 - RNA, 21 nt, synthetic construct
  misc_feature 1..21: note = Synthetic
  source 1..21: mol_type = other RNA
gagaggcacgctctgtcacac

SEQ ID NO: 7287 - RNA, 21 nt, synthetic construct
  misc_feature 1..21: note = Synthetic
  source 1..21: mol_type = other RNA
gagatctagggtgatgccatt

SEQ ID NO: 7288 - RNA, 21 nt, synthetic construct
  misc_feature 1..21: note = Synthetic
  source 1..21: mol_type = other RNA
gagatgcacttcccatcgtgg

SEQ ID NO: 7289 - RNA, 21 nt, synthetic construct
  misc_feature 1..21: note = Synthetic
  source 1..21: mol_type = other RNA
gagatgcatttcccgtcttgg

SEQ ID NO: 7290 - RNA, 21 nt, synthetic construct
  misc_feature 1..21: note = Synthetic
  source 1..21: mol_type = other RNA
gagatggagtgaagtttggag

SEQ ID NO: 7291 - RNA, 21 nt, synthetic construct
  misc_feature 1..21: note = Synthetic
  source 1..21: mol_type = other RNA
gagatgggatctcgctttgtt

SEQ ID NO: 7292 - RNA, 21 nt, synthetic construct
  misc_feature 1..21: note = Synthetic
  source 1..21: mol_type = other RNA
gagatggggtcttactatgtt

SEQ ID NO: 7293 - RNA, 21 nt, synthetic construct
  misc_feature 1..21: note = Synthetic
  source 1..21: mol_type = other RNA
gagattctgaggcaacgtttc

SEQ ID NO: 7294 - RNA, 21 nt, synthetic construct
  misc_feature 1..21: note = Synthetic
  source 1..21: mol_type = other RNA
gagattggtggatgaggcagg

SEQ ID NO: 7295 - RNA, 21 nt, synthetic construct
  misc_feature 1..21: note = Synthetic
  source 1..21: mol_type = other RNA
gagcaaggcgacggtccagcg

SEQ ID NO: 7296 - RNA, 21 nt, synthetic construct
  misc_feature 1..21: note = Synthetic
  source 1..21: mol_type = other RNA
gagcacagcggaaaccgggga

SEQ ID NO: 7297 - RNA, 21 nt, synthetic construct
  misc_feature 1..21: note = Synthetic
  source 1..21: mol_type = other RNA
gagcaccgggcaggaggcctc

SEQ ID NO: 7298 - RNA, 21 nt, synthetic construct
  misc_feature 1..21: note = Synthetic
  source 1..21: mol_type = other RNA
gagcacgatggggaggacaat

SEQ ID NO: 7299 - RNA, 21 nt, synthetic construct
  misc_feature 1..21: note = Synthetic
  source 1..21: mol_type = other RNA
gagcacgtctcctgggactca

SEQ ID NO: 7300 - RNA, 21 nt, synthetic construct
  misc_feature 1..21: note = Synthetic
  source 1..21: mol_type = other RNA
gagcacgtcttgggggagcac

SEQ ID NO: 7301 - RNA, 21 nt, synthetic construct
  misc_feature 1..21: note = Synthetic
  source 1..21: mol_type = other RNA
gagcacgtcttggggggacag

SEQ ID NO: 7302 - RNA, 21 nt, synthetic construct
  misc_feature 1..21: note = Synthetic
  source 1..21: mol_type = other RNA
gagcactggaattcgtcaggg

SEQ ID NO: 7303 - RNA, 21 nt, synthetic construct
  misc_feature 1..21: note = Synthetic
  source 1..21: mol_type = other RNA
gagcactgtagggagaggcac

SEQ ID NO: 7304 - RNA, 21 nt, synthetic construct
  misc_feature 1..21: note = Synthetic
  source 1..21: mol_type = other RNA
gagcaggggctactgtcccct

SEQ ID NO: 7305 - RNA, 21 nt, synthetic construct
  misc_feature 1..21: note = Synthetic
  source 1..21: mol_type = other RNA
gagccactgcgcccggcctca

SEQ ID NO: 7306 - RNA, 21 nt, synthetic construct
  misc_feature 1..21: note = Synthetic
  source 1..21: mol_type = other RNA
gagccatcctggcactcagcg

SEQ ID NO: 7307 - RNA, 21 nt, synthetic construct
  misc_feature 1..21: note = Synthetic
  source 1..21: mol_type = other RNA
gagccatcttcgcagtcgggg

SEQ ID NO: 7308 - RNA, 21 nt, synthetic construct
  misc_feature 1..21: note = Synthetic
  source 1..21: mol_type = other RNA
gagcccacagccttgcaggcc

SEQ ID NO: 7309 - RNA, 21 nt, synthetic construct
  misc_feature 1..21: note = Synthetic
  source 1..21: mol_type = other RNA
gagcccaggggtggccccagg

SEQ ID NO: 7310 - RNA, 21 nt, synthetic construct
  misc_feature 1..21: note = Synthetic
  source 1..21: mol_type = other RNA
gagccctcacgctactgggct

SEQ ID NO: 7311 - RNA, 21 nt, synthetic construct
  misc_feature 1..21: note = Synthetic
  source 1..21: mol_type = other RNA
gagccgtccaagcagtcccgg

SEQ ID NO: 7312 - RNA, 21 nt, synthetic construct
  misc_feature 1..21: note = Synthetic
  source 1..21: mol_type = other RNA
gagccgttctccctgaataac

SEQ ID NO: 7313 - RNA, 21 nt, synthetic construct
  misc_feature 1..21: note = Synthetic
  source 1..21: mol_type = other RNA
gagccgttgtcgcagtccact

SEQ ID NO: 7314 - RNA, 21 nt, synthetic construct
  misc_feature 1..21: note = Synthetic
  source 1..21: mol_type = other RNA
gagcgaccacgttcctcaggt

SEQ ID NO: 7315 - RNA, 21 nt, synthetic construct
  misc_feature 1..21: note = Synthetic
  source 1..21: mol_type = other RNA
gagctcaaaccatcctcccac

SEQ ID NO: 7316 - RNA, 21 nt, synthetic construct
  misc_feature 1..21: note = Synthetic
  source 1..21: mol_type = other RNA
gagctgacctttagcctgacg

SEQ ID NO: 7317 - RNA, 21 nt, synthetic construct
  misc_feature 1..21: note = Synthetic
  source 1..21: mol_type = other RNA
gagctggctgcaggtgtcggg

SEQ ID NO: 7318 - RNA, 21 nt, synthetic construct
  misc_feature 1..21: note = Synthetic
  source 1..21: mol_type = other RNA
gagctgttgcactggaagctg

SEQ ID NO: 7319 - RNA, 21 nt, synthetic construct
  misc_feature 1..21: note = Synthetic
  source 1..21: mol_type = other RNA
gagcttggtgagacattgtca

SEQ ID NO: 7320 - RNA, 21 nt, synthetic construct
  misc_feature 1..21: note = Synthetic
  source 1..21: mol_type = other RNA
gaggaaaggaagaaaccaaaa

SEQ ID NO: 7321 - RNA, 21 nt, synthetic construct
  misc_feature 1..21: note = Synthetic
  source 1..21: mol_type = other RNA
gaggaacgccaggcctcccct

SEQ ID NO: 7322 - RNA, 21 nt, synthetic construct
  misc_feature 1..21: note = Synthetic
  source 1..21: mol_type = other RNA
gaggaatgcagcggttgacac

SEQ ID NO: 7323 - RNA, 21 nt, synthetic construct
  misc_feature 1..21: note = Synthetic
  source 1..21: mol_type = other RNA
gaggacaatggacagagccct

SEQ ID NO: 7324 - RNA, 21 nt, synthetic construct
  misc_feature 1..21: note = Synthetic
  source 1..21: mol_type = other RNA
gaggagatctagggtgatgcc

SEQ ID NO: 7325 - RNA, 21 nt, synthetic construct
  misc_feature 1..21: note = Synthetic
  source 1..21: mol_type = other RNA
gaggagcaaggcgacggtcca

SEQ ID NO: 7326 - RNA, 21 nt, synthetic construct
  misc_feature 1..21: note = Synthetic
  source 1..21: mol_type = other RNA
gaggagcacgatggggaggac

SEQ ID NO: 7327 - RNA, 21 nt, synthetic construct
  misc_feature 1..21: note = Synthetic
  source 1..21: mol_type = other RNA
gaggagcactgtagggagagg

SEQ ID NO: 7328 - RNA, 21 nt, synthetic construct
  misc_feature 1..21: note = Synthetic
  source 1..21: mol_type = other RNA
gaggatgggcaccaggctggt

SEQ ID NO: 7329 - RNA, 21 nt, synthetic construct
  misc_feature 1..21: note = Synthetic
  source 1..21: mol_type = other RNA
gaggattgtgtcacggtggag

SEQ ID NO: 7330 - RNA, 21 nt, synthetic construct
  misc_feature 1..21: note = Synthetic
  source 1..21: mol_type = other RNA
gaggatttatttattttttta

SEQ ID NO: 7331 - RNA, 21 nt, synthetic construct
  misc_feature 1..21: note = Synthetic
  source 1..21: mol_type = other RNA
gaggcaacgtttcaacctcgt

SEQ ID NO: 7332 - RNA, 21 nt, synthetic construct
  misc_feature 1..21: note = Synthetic
  source 1..21: mol_type = other RNA
gaggcaataaccccctacaca

SEQ ID NO: 7333 - RNA, 21 nt, synthetic construct
  misc_feature 1..21: note = Synthetic
  source 1..21: mol_type = other RNA
gaggcacagatactggcagcc

SEQ ID NO: 7334 - RNA, 21 nt, synthetic construct
  misc_feature 1..21: note = Synthetic
  source 1..21: mol_type = other RNA
gaggcacctgtgtctggccaa

SEQ ID NO: 7335 - RNA, 21 nt, synthetic construct
  misc_feature 1..21: note = Synthetic
  source 1..21: mol_type = other RNA
gaggcacgctctgtcacacag

SEQ ID NO: 7336 - RNA, 21 nt, synthetic construct
  misc_feature 1..21: note = Synthetic
  source 1..21: mol_type = other RNA
gaggcagctcctcatgtccct

SEQ ID NO: 7337 - RNA, 21 nt, synthetic construct
  misc_feature 1..21: note = Synthetic
  source 1..21: mol_type = other RNA
gaggcagggccagggggtccc

SEQ ID NO: 7338 - RNA, 21 nt, synthetic construct
  misc_feature 1..21: note = Synthetic
  source 1..21: mol_type = other RNA
gaggcatttcagaggcaataa

SEQ ID NO: 7339 - RNA, 21 nt, synthetic construct
  misc_feature 1..21: note = Synthetic
  source 1..21: mol_type = other RNA
gaggcatttgcatagaagtgg

SEQ ID NO: 7340 - RNA, 21 nt, synthetic construct
  misc_feature 1..21: note = Synthetic
  source 1..21: mol_type = other RNA
gaggccatgggctgctgatgc

SEQ ID NO: 7341 - RNA, 21 nt, synthetic construct
  misc_feature 1..21: note = Synthetic
  source 1..21: mol_type = other RNA
gaggcctcgtctgagccgtcc

SEQ ID NO: 7342 - RNA, 21 nt, synthetic construct
  misc_feature 1..21: note = Synthetic
  source 1..21: mol_type = other RNA
gaggccttgagggtggccggg

SEQ ID NO: 7343 - RNA, 21 nt, synthetic construct
  misc_feature 1..21: note = Synthetic
  source 1..21: mol_type = other RNA
gaggcggccactgaggagatc

SEQ ID NO: 7344 - RNA, 21 nt, synthetic construct
  misc_feature 1..21: note = Synthetic
  source 1..21: mol_type = other RNA
gaggcggctccggggacccgg

SEQ ID NO: 7345 - RNA, 21 nt, synthetic construct
  misc_feature 1..21: note = Synthetic
  source 1..21: mol_type = other RNA
gaggcggttggcactgaaaat

SEQ ID NO: 7346 - RNA, 21 nt, synthetic construct
  misc_feature 1..21: note = Synthetic
  source 1..21: mol_type = other RNA
gaggctggtgtactcgctccg

SEQ ID NO: 7347 - RNA, 21 nt, synthetic construct
  misc_feature 1..21: note = Synthetic
  source 1..21: mol_type = other RNA
gaggctgtcactgtctctccg

SEQ ID NO: 7348 - RNA, 21 nt, synthetic construct
  misc_feature 1..21: note = Synthetic
  source 1..21: mol_type = other RNA
gagggcccaggataacggagg

SEQ ID NO: 7349 - RNA, 21 nt, synthetic construct
  misc_feature 1..21: note = Synthetic
  source 1..21: mol_type = other RNA
gagggcgactcgtgtatgtcg

SEQ ID NO: 7350 - RNA, 21 nt, synthetic construct
  misc_feature 1..21: note = Synthetic
  source 1..21: mol_type = other RNA
gagggcgccccccaggacaag

SEQ ID NO: 7351 - RNA, 21 nt, synthetic construct
  misc_feature 1..21: note = Synthetic
  source 1..21: mol_type = other RNA
gaggggcggggagattctgag

SEQ ID NO: 7352 - RNA, 21 nt, synthetic construct
  misc_feature 1..21: note = Synthetic
  source 1..21: mol_type = other RNA
gaggggtagctgtagccgtcc

SEQ ID NO: 7353 - RNA, 21 nt, synthetic construct
  misc_feature 1..21: note = Synthetic
  source 1..21: mol_type = other RNA
gagggtggccgggggcccctc

SEQ ID NO: 7354 - RNA, 21 nt, synthetic construct
  misc_feature 1..21: note = Synthetic
  source 1..21: mol_type = other RNA
gaggtaaacacgttgactcct

SEQ ID NO: 7355 - RNA, 21 nt, synthetic construct
  misc_feature 1..21: note = Synthetic
  source 1..21: mol_type = other RNA
gaggtaggcgatggagcccac

SEQ ID NO: 7356 - RNA, 21 nt, synthetic construct
  misc_feature 1..21: note = Synthetic
  source 1..21: mol_type = other RNA
gaggtctcaggaagggttctg

SEQ ID NO: 7357 - RNA, 21 nt, synthetic construct
  misc_feature 1..21: note = Synthetic
  source 1..21: mol_type = other RNA
gaggtgtcatcctggtccccc

SEQ ID NO: 7358 - RNA, 21 nt, synthetic construct
  misc_feature 1..21: note = Synthetic
  source 1..21: mol_type = other RNA
gaggtgtcgccacagagcaca

SEQ ID NO: 7359 - RNA, 21 nt, synthetic construct
  misc_feature 1..21: note = Synthetic
  source 1..21: mol_type = other RNA
gaggtgtcgggaacaggtcgg

SEQ ID NO: 7360 - RNA, 21 nt, synthetic construct
  misc_feature 1..21: note = Synthetic
  source 1..21: mol_type = other RNA
gaggttgtggaagagaaccat

SEQ ID NO: 7361 - RNA, 21 nt, synthetic construct
  misc_feature 1..21: note = Synthetic
  source 1..21: mol_type = other RNA
gagtagatgtccacaccattc

SEQ ID NO: 7362 - RNA, 21 nt, synthetic construct
  misc_feature 1..21: note = Synthetic
  source 1..21: mol_type = other RNA
gagtagctgggactacaggtg

SEQ ID NO: 7363 - RNA, 21 nt, synthetic construct
  misc_feature 1..21: note = Synthetic
  source 1..21: mol_type = other RNA
gagtcaacccagtagaggcgg

SEQ ID NO: 7364 - RNA, 21 nt, synthetic construct
  misc_feature 1..21: note = Synthetic
  source 1..21: mol_type = other RNA
gagtcacagacgaactgccga

SEQ ID NO: 7365 - RNA, 21 nt, synthetic construct
  misc_feature 1..21: note = Synthetic
  source 1..21: mol_type = other RNA
gagtcggtccagtagatgttg

SEQ ID NO: 7366 - RNA, 21 nt, synthetic construct
  misc_feature 1..21: note = Synthetic
  source 1..21: mol_type = other RNA
gagtctcgctctgtcgcccag

SEQ ID NO: 7367 - RNA, 21 nt, synthetic construct
  misc_feature 1..21: note = Synthetic
  source 1..21: mol_type = other RNA
gagtctgacggaggctgtcac

SEQ ID NO: 7368 - RNA, 21 nt, synthetic construct
  misc_feature 1..21: note = Synthetic
  source 1..21: mol_type = other RNA
gagtgaagtttggagtcaacc

SEQ ID NO: 7369 - RNA, 21 nt, synthetic construct
  misc_feature 1..21: note = Synthetic
  source 1..21: mol_type = other RNA
gagtgcagtggctcgatcatg

SEQ ID NO: 7370 - RNA, 21 nt, synthetic construct
  misc_feature 1..21: note = Synthetic
  source 1..21: mol_type = other RNA
gagtggatgcactcgccactt

SEQ ID NO: 7371 - RNA, 21 nt, synthetic construct
  misc_feature 1..21: note = Synthetic
  source 1..21: mol_type = other RNA
gagtgggggttgatctgcggg

SEQ ID NO: 7372 - RNA, 21 nt, synthetic construct
  misc_feature 1..21: note = Synthetic
  source 1..21: mol_type = other RNA
gagtgtcacattaacgcagcc

SEQ ID NO: 7373 - RNA, 21 nt, synthetic construct
  misc_feature 1..21: note = Synthetic
  source 1..21: mol_type = other RNA
gagtgtcagacagccttgctc

SEQ ID NO: 7374 - RNA, 21 nt, synthetic construct
  misc_feature 1..21: note = Synthetic
  source 1..21: mol_type = other RNA
gagttccccagtcagtccagt

SEQ ID NO: 7375 - RNA, 21 nt, synthetic construct
  misc_feature 1..21: note = Synthetic
  source 1..21: mol_type = other RNA
gagtttaggggtttggcttag

SEQ ID NO: 7376 - RNA, 21 nt, synthetic construct
  misc_feature 1..21: note = Synthetic
  source 1..21: mol_type = other RNA
gagtttggtctcggtgccacc

SEQ ID NO: 7377 - RNA, 21 nt, synthetic construct
  misc_feature 1..21: note = Synthetic
  source 1..21: mol_type = other RNA
gataacagtttcaaccaatat

SEQ ID NO: 7378 - RNA, 21 nt, synthetic construct
  misc_feature 1..21: note = Synthetic
  source 1..21: mol_type = other RNA
gataacggagggcgactcgtg

SEQ ID NO: 7379 - RNA, 21 nt, synthetic construct
  misc_feature 1..21: note = Synthetic
  source 1..21: mol_type = other RNA
gatactggcagccgccattgc

SEQ ID NO: 7380 - RNA, 21 nt, synthetic construct
  misc_feature 1..21: note = Synthetic
  source 1..21: mol_type = other RNA
gatagacggggttgtcaaagt

SEQ ID NO: 7381 - RNA, 21 nt, synthetic construct
  misc_feature 1..21: note = Synthetic
  source 1..21: mol_type = other RNA
gatatcgcactctttgatggg

SEQ ID NO: 7382 - RNA, 21 nt, synthetic construct
  misc_feature 1..21: note = Synthetic
  source 1..21: mol_type = other RNA
gatatctgtccaaaatacttt

SEQ ID NO: 7383 - RNA, 21 nt, synthetic construct
  misc_feature 1..21: note = Synthetic
  source 1..21: mol_type = other RNA
gatatcttcgcatcttcgctg

SEQ ID NO: 7384 - RNA, 21 nt, synthetic construct
  misc_feature 1..21: note = Synthetic
  source 1..21: mol_type = other RNA
gatattcacgatcacggcttt

SEQ ID NO: 7385 - RNA, 21 nt, synthetic construct
  misc_feature 1..21: note = Synthetic
  source 1..21: mol_type = other RNA
gatcacaggcacgtgccaccg

SEQ ID NO: 7386 - RNA, 21 nt, synthetic construct
  misc_feature 1..21: note = Synthetic
  source 1..21: mol_type = other RNA
gatcacagtaagacattcagg

SEQ ID NO: 7387 - RNA, 21 nt, synthetic construct
  misc_feature 1..21: note = Synthetic
  source 1..21: mol_type = other RNA
gatcacgacctgctgtgtcct

SEQ ID NO: 7388 - RNA, 21 nt, synthetic construct
  misc_feature 1..21: note = Synthetic
  source 1..21: mol_type = other RNA
gatcacggctttgaagtcccg

SEQ ID NO: 7389 - RNA, 21 nt, synthetic construct
  misc_feature 1..21: note = Synthetic
  source 1..21: mol_type = other RNA
gatcatggctcactgcaacct

SEQ ID NO: 7390 - RNA, 21 nt, synthetic construct
  misc_feature 1..21: note = Synthetic
  source 1..21: mol_type = other RNA
gatcattctctgggacaggtc

SEQ ID NO: 7391 - RNA, 21 nt, synthetic construct
  misc_feature 1..21: note = Synthetic
  source 1..21: mol_type = other RNA
gatcatttccgacgccatgaa

SEQ ID NO: 7392 - RNA, 21 nt, synthetic construct
  misc_feature 1..21: note = Synthetic
  source 1..21: mol_type = other RNA
gatccaccacgatggcccttg

SEQ ID NO: 7393 - RNA, 21 nt, synthetic construct
  misc_feature 1..21: note = Synthetic
  source 1..21: mol_type = other RNA
gatccacccgcctcggcctcc

SEQ ID NO: 7394 - RNA, 21 nt, synthetic construct
  misc_feature 1..21: note = Synthetic
  source 1..21: mol_type = other RNA
gatccagactggaggatttat

SEQ ID NO: 7395 - RNA, 21 nt, synthetic construct
  misc_feature 1..21: note = Synthetic
  source 1..21: mol_type = other RNA
gatccagctcagcctcccaaa

SEQ ID NO: 7396 - RNA, 21 nt, synthetic construct
  misc_feature 1..21: note = Synthetic
  source 1..21: mol_type = other RNA
gatccagtccacagccagccc

SEQ ID NO: 7397 - RNA, 21 nt, synthetic construct
  misc_feature 1..21: note = Synthetic
  source 1..21: mol_type = other RNA
gatcccatcccaacacacacg

SEQ ID NO: 7398 - RNA, 21 nt, synthetic construct
  misc_feature 1..21: note = Synthetic
  source 1..21: mol_type = other RNA
gatcctcctgcctcagcctcc

SEQ ID NO: 7399 - RNA, 21 nt, synthetic construct
  misc_feature 1..21: note = Synthetic
  source 1..21: mol_type = other RNA
gatcctgacactcatcgatat

SEQ ID NO: 7400 - RNA, 21 nt, synthetic construct
  misc_feature 1..21: note = Synthetic
  source 1..21: mol_type = other RNA
gatcggggctggtggggcgag

SEQ ID NO: 7401 - RNA, 21 nt, synthetic construct
  misc_feature 1..21: note = Synthetic
  source 1..21: mol_type = other RNA
gatctagggtgatgccattgg

SEQ ID NO: 7402 - RNA, 21 nt, synthetic construct
  misc_feature 1..21: note = Synthetic
  source 1..21: mol_type = other RNA
gatctcctgacctcatgatcc

SEQ ID NO: 7403 - RNA, 21 nt, synthetic construct
  misc_feature 1..21: note = Synthetic
  source 1..21: mol_type = other RNA
gatctcgctttgttgctcagg

SEQ ID NO: 7404 - RNA, 21 nt, synthetic construct
  misc_feature 1..21: note = Synthetic
  source 1..21: mol_type = other RNA
gatctcggctgcagaccaagg

SEQ ID NO: 7405 - RNA, 21 nt, synthetic construct
  misc_feature 1..21: note = Synthetic
  source 1..21: mol_type = other RNA
gatctgcggggcagggaggca

SEQ ID NO: 7406 - RNA, 21 nt, synthetic construct
  misc_feature 1..21: note = Synthetic
  source 1..21: mol_type = other RNA
gatcttaaggtcattgcagac

SEQ ID NO: 7407 - RNA, 21 nt, synthetic construct
  misc_feature 1..21: note = Synthetic
  source 1..21: mol_type = other RNA
gatcttggcgggagttcccca

SEQ ID NO: 7408 - RNA, 21 nt, synthetic construct
  misc_feature 1..21: note = Synthetic
  source 1..21: mol_type = other RNA
gatgaataaatatataaaaca

SEQ ID NO: 7409 - RNA, 21 nt, synthetic construct
  misc_feature 1..21: note = Synthetic
  source 1..21: mol_type = other RNA
gatgacggtgtcataggaaga

SEQ ID NO: 7410 - RNA, 21 nt, synthetic construct
  misc_feature 1..21: note = Synthetic
  source 1..21: mol_type = other RNA
gatgaggcagggccagggggt

SEQ ID NO: 7411 - RNA, 21 nt, synthetic construct
  misc_feature 1..21: note = Synthetic
  source 1..21: mol_type = other RNA
gatgaggctggtgtactcgct

SEQ ID NO: 7412 - RNA, 21 nt, synthetic construct
  misc_feature 1..21: note = Synthetic
  source 1..21: mol_type = other RNA
gatgatatctgtccaaaatac

SEQ ID NO: 7413 - RNA, 21 nt, synthetic construct
  misc_feature 1..21: note = Synthetic
  source 1..21: mol_type = other RNA
gatgcaccatgcatggttttt

SEQ ID NO: 7414 - RNA, 21 nt, synthetic construct
  misc_feature 1..21: note = Synthetic
  source 1..21: mol_type = other RNA
gatgcactcgccacttaggca

SEQ ID NO: 7415 - RNA, 21 nt, synthetic construct
  misc_feature 1..21: note = Synthetic
  source 1..21: mol_type = other RNA
gatgcacttcccatcgtggca

SEQ ID NO: 7416 - RNA, 21 nt, synthetic construct
  misc_feature 1..21: note = Synthetic
  source 1..21: mol_type = other RNA
gatgcaggtggagctgttgca

SEQ ID NO: 7417 - RNA, 21 nt, synthetic construct
  misc_feature 1..21: note = Synthetic
  source 1..21: mol_type = other RNA
gatgcagtttccatcagagca

SEQ ID NO: 7418 - RNA, 21 nt, synthetic construct
  misc_feature 1..21: note = Synthetic
  source 1..21: mol_type = other RNA
gatgcattcgccgctgtgaca

SEQ ID NO: 7419 - RNA, 21 nt, synthetic construct
  misc_feature 1..21: note = Synthetic
  source 1..21: mol_type = other RNA
gatgcatttcccgtcttggca

SEQ ID NO: 7420 - RNA, 21 nt, synthetic construct
  misc_feature 1..21: note = Synthetic
  source 1..21: mol_type = other RNA
gatgccattgggccactgaat

SEQ ID NO: 7421 - RNA, 21 nt, synthetic construct
  misc_feature 1..21: note = Synthetic
  source 1..21: mol_type = other RNA
gatgctgttgatgttcttaag

SEQ ID NO: 7422 - RNA, 21 nt, synthetic construct
  misc_feature 1..21: note = Synthetic
  source 1..21: mol_type = other RNA
gatgcttgagatggagtgaag

SEQ ID NO: 7423 - RNA, 21 nt, synthetic construct
  misc_feature 1..21: note = Synthetic
  source 1..21: mol_type = other RNA
gatggagcccacagccttgca

SEQ ID NO: 7424 - RNA, 21 nt, synthetic construct
  misc_feature 1..21: note = Synthetic
  source 1..21: mol_type = other RNA
gatggagtgaagtttggagtc

SEQ ID NO: 7425 - RNA, 21 nt, synthetic construct
  misc_feature 1..21: note = Synthetic
  source 1..21: mol_type = other RNA
gatggcccttggcttggagcc

SEQ ID NO: 7426 - RNA, 21 nt, synthetic construct
  misc_feature 1..21: note = Synthetic
  source 1..21: mol_type = other RNA
gatgggatctcgctttgttgc

SEQ ID NO: 7427 - RNA, 21 nt, synthetic construct
  misc_feature 1..21: note = Synthetic
  source 1..21: mol_type = other RNA
gatgggcaccaggctggtgtc

SEQ ID NO: 7428 - RNA, 21 nt, synthetic construct
  misc_feature 1..21: note = Synthetic
  source 1..21: mol_type = other RNA
gatggggaggacaatggacag

SEQ ID NO: 7429 - RNA, 21 nt, synthetic construct
  misc_feature 1..21: note = Synthetic
  source 1..21: mol_type = other RNA
gatggggtcttactatgttgc

SEQ ID NO: 7430 - RNA, 21 nt, synthetic construct
  misc_feature 1..21: note = Synthetic
  source 1..21: mol_type = other RNA
gatgggttcatctgaccagtc

SEQ ID NO: 7431 - RNA, 21 nt, synthetic construct
  misc_feature 1..21: note = Synthetic
  source 1..21: mol_type = other RNA
gatggtctcgatctcctgacc

SEQ ID NO: 7432 - RNA, 21 nt, synthetic construct
  misc_feature 1..21: note = Synthetic
  source 1..21: mol_type = other RNA
gatggtcttccggttgccccc

SEQ ID NO: 7433 - RNA, 21 nt, synthetic construct
  misc_feature 1..21: note = Synthetic
  source 1..21: mol_type = other RNA
gatgtccacaccattcaggcc

SEQ ID NO: 7434 - RNA, 21 nt, synthetic construct
  misc_feature 1..21: note = Synthetic
  source 1..21: mol_type = other RNA
gatgtctcctgggtggccact

SEQ ID NO: 7435 - RNA, 21 nt, synthetic construct
  misc_feature 1..21: note = Synthetic
  source 1..21: mol_type = other RNA
gatgtctctgctgatgacggt

SEQ ID NO: 7436 - RNA, 21 nt, synthetic construct
  misc_feature 1..21: note = Synthetic
  source 1..21: mol_type = other RNA
gatgttcacgccacgtcatcc

SEQ ID NO: 7437 - RNA, 21 nt, synthetic construct
  misc_feature 1..21: note = Synthetic
  source 1..21: mol_type = other RNA
gatgttcttaagccgccagtt

SEQ ID NO: 7438 - RNA, 21 nt, synthetic construct
  misc_feature 1..21: note = Synthetic
  source 1..21: mol_type = other RNA
gatgttgctgtggatccagtc

SEQ ID NO: 7439 - RNA, 21 nt, synthetic construct
  misc_feature 1..21: note = Synthetic
  source 1..21: mol_type = other RNA
gattacaggcgtgagccactg

SEQ ID NO: 7440 - RNA, 21 nt, synthetic construct
  misc_feature 1..21: note = Synthetic
  source 1..21: mol_type = other RNA
gattacaggcgtgaggcacct

SEQ ID NO: 7441 - RNA, 21 nt, synthetic construct
  misc_feature 1..21: note = Synthetic
  source 1..21: mol_type = other RNA
gattcagccagatcatttccg

SEQ ID NO: 7442 - RNA, 21 nt, synthetic construct
  misc_feature 1..21: note = Synthetic
  source 1..21: mol_type = other RNA
gattcgggggtgacagggcaa

SEQ ID NO: 7443 - RNA, 21 nt, synthetic construct
  misc_feature 1..21: note = Synthetic
  source 1..21: mol_type = other RNA
gattctattgctggccacctc

SEQ ID NO: 7444 - RNA, 21 nt, synthetic construct
  misc_feature 1..21: note = Synthetic
  source 1..21: mol_type = other RNA
gattctgaggcaacgtttcaa

SEQ ID NO: 7445 - RNA, 21 nt, synthetic construct
  misc_feature 1..21: note = Synthetic
  source 1..21: mol_type = other RNA
gattggggaagtgaatggctt

SEQ ID NO: 7446 - RNA, 21 nt, synthetic construct
  misc_feature 1..21: note = Synthetic
  source 1..21: mol_type = other RNA
gattggtggatgaggcagggc

SEQ ID NO: 7447 - RNA, 21 nt, synthetic construct
  misc_feature 1..21: note = Synthetic
  source 1..21: mol_type = other RNA
gattgtgtcacggtggagaga

SEQ ID NO: 7448 - RNA, 21 nt, synthetic construct
  misc_feature 1..21: note = Synthetic
  source 1..21: mol_type = other RNA
gatttatttatttttttatag

SEQ ID NO: 7449 - RNA, 21 nt, synthetic construct
  misc_feature 1..21: note = Synthetic
  source 1..21: mol_type = other RNA
gatttcagaaagaacctgaag

SEQ ID NO: 7450 - RNA, 21 nt, synthetic construct
  misc_feature 1..21: note = Synthetic
  source 1..21: mol_type = other RNA
gatttgcaggtgacagacaag

SEQ ID NO: 7451 - RNA, 21 nt, synthetic construct
  misc_feature 1..21: note = Synthetic
  source 1..21: mol_type = other RNA
gatttgtccttgcagtcgggg

SEQ ID NO: 7452 - RNA, 21 nt, synthetic construct
  misc_feature 1..21: note = Synthetic
  source 1..21: mol_type = other RNA
gattttatatatatgtgtgta

SEQ ID NO: 7453 - RNA, 21 nt, synthetic construct
  misc_feature 1..21: note = Synthetic
  source 1..21: mol_type = other RNA
gatttttaactttttggtttt

SEQ ID NO: 7454 - RNA, 21 nt, synthetic construct
  misc_feature 1..21: note = Synthetic
  source 1..21: mol_type = other RNA
gcaaaaataaatagattttat

SEQ ID NO: 7455 - RNA, 21 nt, synthetic construct
  misc_feature 1..21: note = Synthetic
  source 1..21: mol_type = other RNA
gcaaaataataacacaaatgc

SEQ ID NO: 7456 - RNA, 21 nt, synthetic construct
  misc_feature 1..21: note = Synthetic
  source 1..21: mol_type = other RNA
gcaaacataacaaaaaatccc

SEQ ID NO: 7457 - RNA, 21 nt, synthetic construct
  misc_feature 1..21: note = Synthetic
  source 1..21: mol_type = other RNA
gcaaaggaagacgaggagcac

SEQ ID NO: 7458 - RNA, 21 nt, synthetic construct
  misc_feature 1..21: note = Synthetic
  source 1..21: mol_type = other RNA
gcaaaggctaacctggctgtc

SEQ ID NO: 7459 - RNA, 21 nt, synthetic construct
  misc_feature 1..21: note = Synthetic
  source 1..21: mol_type = other RNA
gcaaataatctttgtacataa

SEQ ID NO: 7460 - RNA, 21 nt, synthetic construct
  misc_feature 1..21: note = Synthetic
  source 1..21: mol_type = other RNA
gcaaatgtggacctcatcctc

SEQ ID NO: 7461 - RNA, 21 nt, synthetic construct
  misc_feature 1..21: note = Synthetic
  source 1..21: mol_type = other RNA
gcaacagagacagtgcccagg

SEQ ID NO: 7462 - RNA, 21 nt, synthetic construct
  misc_feature 1..21: note = Synthetic
  source 1..21: mol_type = other RNA
gcaacagtaacacggcgattt

SEQ ID NO: 7463 - RNA, 21 nt, synthetic construct
  misc_feature 1..21: note = Synthetic
  source 1..21: mol_type = other RNA
gcaaccagggtttgcaaaaat

SEQ ID NO: 7464 - RNA, 21 nt, synthetic construct
  misc_feature 1..21: note = Synthetic
  source 1..21: mol_type = other RNA
gcaacctccacctcctgggct

SEQ ID NO: 7465 - RNA, 21 nt, synthetic construct
  misc_feature 1..21: note = Synthetic
  source 1..21: mol_type = other RNA
gcaacgtcgcccagagcttgg

SEQ ID NO: 7466 - RNA, 21 nt, synthetic construct
  misc_feature 1..21: note = Synthetic
  source 1..21: mol_type = other RNA
gcaacgtttcaacctcgtaag

SEQ ID NO: 7467 - RNA, 21 nt, synthetic construct
  misc_feature 1..21: note = Synthetic
  source 1..21: mol_type = other RNA
gcaagctccgcttcccgggtt

SEQ ID NO: 7468 - RNA, 21 nt, synthetic construct
  misc_feature 1..21: note = Synthetic
  source 1..21: mol_type = other RNA
gcaaggagaccacgggaatgg

SEQ ID NO: 7469 - RNA, 21 nt, synthetic construct
  misc_feature 1..21: note = Synthetic
  source 1..21: mol_type = other RNA
gcaaggcgacggtccagcgca

SEQ ID NO: 7470 - RNA, 21 nt, synthetic construct
  misc_feature 1..21: note = Synthetic
  source 1..21: mol_type = other RNA
gcaaggcttgcatagaagagg

SEQ ID NO: 7471 - RNA, 21 nt, synthetic construct
  misc_feature 1..21: note = Synthetic
  source 1..21: mol_type = other RNA
gcaataaccccctacacaggg

SEQ ID NO: 7472 - RNA, 21 nt, synthetic construct
  misc_feature 1..21: note = Synthetic
  source 1..21: mol_type = other RNA
gcaatctcggctcactgcaag

SEQ ID NO: 7473 - RNA, 21 nt, synthetic construct
  misc_feature 1..21: note = Synthetic
  source 1..21: mol_type = other RNA
gcaatgctttggtcttctctg

SEQ ID NO: 7474 - RNA, 21 nt, synthetic construct
  misc_feature 1..21: note = Synthetic
  source 1..21: mol_type = other RNA
gcaatttccagccccagggcc

SEQ ID NO: 7475 - RNA, 21 nt, synthetic construct
  misc_feature 1..21: note = Synthetic
  source 1..21: mol_type = other RNA
gcacacagtccagttcgtgca

SEQ ID NO: 7476 - RNA, 21 nt, synthetic construct
  misc_feature 1..21: note = Synthetic
  source 1..21: mol_type = other RNA
gcacagatactggcagccgcc

SEQ ID NO: 7477 - RNA, 21 nt, synthetic construct
  misc_feature 1..21: note = Synthetic
  source 1..21: mol_type = other RNA
gcacagcggaaaccggggact

SEQ ID NO: 7478 - RNA, 21 nt, synthetic construct
  misc_feature 1..21: note = Synthetic
  source 1..21: mol_type = other RNA
gcacaggcactcgtagccgat

SEQ ID NO: 7479 - RNA, 21 nt, synthetic construct
  misc_feature 1..21: note = Synthetic
  source 1..21: mol_type = other RNA
gcaccaggctggtgtcctgac

SEQ ID NO: 7480 - RNA, 21 nt, synthetic construct
  misc_feature 1..21: note = Synthetic
  source 1..21: mol_type = other RNA
gcaccatgcatggtttttttt

SEQ ID NO: 7481 - RNA, 21 nt, synthetic construct
  misc_feature 1..21: note = Synthetic
  source 1..21: mol_type = other RNA
gcaccgggcaggaggcctcgt

SEQ ID NO: 7482 - RNA, 21 nt, synthetic construct
  misc_feature 1..21: note = Synthetic
  source 1..21: mol_type = other RNA
gcacctccagaactgaggaat

SEQ ID NO: 7483 - RNA, 21 nt, synthetic construct
  misc_feature 1..21: note = Synthetic
  source 1..21: mol_type = other RNA
gcacctgtgtctggccaaatt

SEQ ID NO: 7484 - RNA, 21 nt, synthetic construct
  misc_feature 1..21: note = Synthetic
  source 1..21: mol_type = other RNA
gcacgatggggaggacaatgg

SEQ ID NO: 7485 - RNA, 21 nt, synthetic construct
  misc_feature 1..21: note = Synthetic
  source 1..21: mol_type = other RNA
gcacgctctgtcacacagctg

SEQ ID NO: 7486 - RNA, 21 nt, synthetic construct
  misc_feature 1..21: note = Synthetic
  source 1..21: mol_type = other RNA
gcacgtctcctgggactcatc

SEQ ID NO: 7487 - RNA, 21 nt, synthetic construct
  misc_feature 1..21: note = Synthetic
  source 1..21: mol_type = other RNA
gcacgtcttgggggagcacgt

SEQ ID NO: 7488 - RNA, 21 nt, synthetic construct
  misc_feature 1..21: note = Synthetic
  source 1..21: mol_type = other RNA
gcacgtcttggggggacagcc

SEQ ID NO: 7489 - RNA, 21 nt, synthetic construct
  misc_feature 1..21: note = Synthetic
  source 1..21: mol_type = other RNA
gcacgtgccaccgtacccagc

SEQ ID NO: 7490 - RNA, 21 nt, synthetic construct
  misc_feature 1..21: note = Synthetic
  source 1..21: mol_type = other RNA
gcactaggtgggcggacataa

SEQ ID NO: 7491 - RNA, 21 nt, synthetic construct
  misc_feature 1..21: note = Synthetic
  source 1..21: mol_type = other RNA
gcactcagcgctgccatcgca

SEQ ID NO: 7492 - RNA, 21 nt, synthetic construct
  misc_feature 1..21: note = Synthetic
  source 1..21: mol_type = other RNA
gcactcgccacttaggcagtg

SEQ ID NO: 7493 - RNA, 21 nt, synthetic construct
  misc_feature 1..21: note = Synthetic
  source 1..21: mol_type = other RNA
gcactcgtagccgatcttaag

SEQ ID NO: 7494 - RNA, 21 nt, synthetic construct
  misc_feature 1..21: note = Synthetic
  source 1..21: mol_type = other RNA
gcactctttgatgggttcatc

SEQ ID NO: 7495 - RNA, 21 nt, synthetic construct
  misc_feature 1..21: note = Synthetic
  source 1..21: mol_type = other RNA
gcactgaaaatggcttcgttg

SEQ ID NO: 7496 - RNA, 21 nt, synthetic construct
  misc_feature 1..21: note = Synthetic
  source 1..21: mol_type = other RNA
gcactggaactcgtttctttc

SEQ ID NO: 7497 - RNA, 21 nt, synthetic construct
  misc_feature 1..21: note = Synthetic
  source 1..21: mol_type = other RNA
gcactggaagctggcgggacc

SEQ ID NO: 7498 - RNA, 21 nt, synthetic construct
  misc_feature 1..21: note = Synthetic
  source 1..21: mol_type = other RNA
gcactggaattcgtcagggcg

SEQ ID NO: 7499 - RNA, 21 nt, synthetic construct
  misc_feature 1..21: note = Synthetic
  source 1..21: mol_type = other RNA
gcactgggggggacacagtgt

SEQ ID NO: 7500 - RNA, 21 nt, synthetic construct
  misc_feature 1..21: note = Synthetic
  source 1..21: mol_type = other RNA
gcactgtagggagaggcacgc

SEQ ID NO: 7501 - RNA, 21 nt, synthetic construct
  misc_feature 1..21: note = Synthetic
  source 1..21: mol_type = other RNA
gcactgtccgaagcctgttct

SEQ ID NO: 7502 - RNA, 21 nt, synthetic construct
  misc_feature 1..21: note = Synthetic
  source 1..21: mol_type = other RNA
gcacttaataaatattaaggg

SEQ ID NO: 7503 - RNA, 21 nt, synthetic construct
  misc_feature 1..21: note = Synthetic
  source 1..21: mol_type = other RNA
gcacttcccatcgtggcagcg

SEQ ID NO: 7504 - RNA, 21 nt, synthetic construct
  misc_feature 1..21: note = Synthetic
  source 1..21: mol_type = other RNA
gcacttgtagccaccctccag

SEQ ID NO: 7505 - RNA, 21 nt, synthetic construct
  misc_feature 1..21: note = Synthetic
  source 1..21: mol_type = other RNA
gcagaccaaggaggggcgggg

SEQ ID NO: 7506 - RNA, 21 nt, synthetic construct
  misc_feature 1..21: note = Synthetic
  source 1..21: mol_type = other RNA
gcagacccacttgtaggagat

SEQ ID NO: 7507 - RNA, 21 nt, synthetic construct
  misc_feature 1..21: note = Synthetic
  source 1..21: mol_type = other RNA
gcagacgtgggaacagccgcc

SEQ ID NO: 7508 - RNA, 21 nt, synthetic construct
  misc_feature 1..21: note = Synthetic
  source 1..21: mol_type = other RNA
gcagactttgtccagggtgat

SEQ ID NO: 7509 - RNA, 21 nt, synthetic construct
  misc_feature 1..21: note = Synthetic
  source 1..21: mol_type = other RNA
gcagagctggctgcaggtgtc

SEQ ID NO: 7510 - RNA, 21 nt, synthetic construct
  misc_feature 1..21: note = Synthetic
  source 1..21: mol_type = other RNA
gcagagtgtcacattaacgca

SEQ ID NO: 7511 - RNA, 21 nt, synthetic construct
  misc_feature 1..21: note = Synthetic
  source 1..21: mol_type = other RNA
gcagagtgtcagacagccttg

SEQ ID NO: 7512 - RNA, 21 nt, synthetic construct
  misc_feature 1..21: note = Synthetic
  source 1..21: mol_type = other RNA
gcagatcattctctgggacag

SEQ ID NO: 7513 - RNA, 21 nt, synthetic construct
  misc_feature 1..21: note = Synthetic
  source 1..21: mol_type = other RNA
gcagatgttcacgccacgtca

SEQ ID NO: 7514 - RNA, 21 nt, synthetic construct
  misc_feature 1..21: note = Synthetic
  source 1..21: mol_type = other RNA
gcagcatgccgtccgggcagg

SEQ ID NO: 7515 - RNA, 21 nt, synthetic construct
  misc_feature 1..21: note = Synthetic
  source 1..21: mol_type = other RNA
gcagccaacttcatcgctcat

SEQ ID NO: 7516 - RNA, 21 nt, synthetic construct
  misc_feature 1..21: note = Synthetic
  source 1..21: mol_type = other RNA
gcagccgccattgctcagggt

SEQ ID NO: 7517 - RNA, 21 nt, synthetic construct
  misc_feature 1..21: note = Synthetic
  source 1..21: mol_type = other RNA
gcagccgggaggtgtcgggaa

SEQ ID NO: 7518 - RNA, 21 nt, synthetic construct
  misc_feature 1..21: note = Synthetic
  source 1..21: mol_type = other RNA
gcagcctcagcctctcttggc

SEQ ID NO: 7519 - RNA, 21 nt, synthetic construct
  misc_feature 1..21: note = Synthetic
  source 1..21: mol_type = other RNA
gcagcctcagcctctgtgagg

SEQ ID NO: 7520 - RNA, 21 nt, synthetic construct
  misc_feature 1..21: note = Synthetic
  source 1..21: mol_type = other RNA
gcagcctctgccaggcagtgt

SEQ ID NO: 7521 - RNA, 21 nt, synthetic construct
  misc_feature 1..21: note = Synthetic
  source 1..21: mol_type = other RNA
gcagcgaaactcgtcctggga

SEQ ID NO: 7522 - RNA, 21 nt, synthetic construct
  misc_feature 1..21: note = Synthetic
  source 1..21: mol_type = other RNA
gcagcggttgacacggccccc

SEQ ID NO: 7523 - RNA, 21 nt, synthetic construct
  misc_feature 1..21: note = Synthetic
  source 1..21: mol_type = other RNA
gcagctcctcatgtccctggc

SEQ ID NO: 7524 - RNA, 21 nt, synthetic construct
  misc_feature 1..21: note = Synthetic
  source 1..21: mol_type = other RNA
gcaggaggcctcgtctgagcc

SEQ ID NO: 7525 - RNA, 21 nt, synthetic construct
  misc_feature 1..21: note = Synthetic
  source 1..21: mol_type = other RNA
gcaggcaatgctttggtcttc

SEQ ID NO: 7526 - RNA, 21 nt, synthetic construct
  misc_feature 1..21: note = Synthetic
  source 1..21: mol_type = other RNA
gcaggccacgtgtcctcacgg

SEQ ID NO: 7527 - RNA, 21 nt, synthetic construct
  misc_feature 1..21: note = Synthetic
  source 1..21: mol_type = other RNA
gcaggcccacagctgggggat

SEQ ID NO: 7528 - RNA, 21 nt, synthetic construct
  misc_feature 1..21: note = Synthetic
  source 1..21: mol_type = other RNA
gcaggccttcgtgtgggggtc

SEQ ID NO: 7529 - RNA, 21 nt, synthetic construct
  misc_feature 1..21: note = Synthetic
  source 1..21: mol_type = other RNA
gcaggcgcaggtaaacttggg

SEQ ID NO: 7530 - RNA, 21 nt, synthetic construct
  misc_feature 1..21: note = Synthetic
  source 1..21: mol_type = other RNA
gcagggacgggactccaggca

SEQ ID NO: 7531 - RNA, 21 nt, synthetic construct
  misc_feature 1..21: note = Synthetic
  source 1..21: mol_type = other RNA
gcagggaggcacagatactgg

SEQ ID NO: 7532 - RNA, 21 nt, synthetic construct
  misc_feature 1..21: note = Synthetic
  source 1..21: mol_type = other RNA
gcagggccagggggtcccgtt

SEQ ID NO: 7533 - RNA, 21 nt, synthetic construct
  misc_feature 1..21: note = Synthetic
  source 1..21: mol_type = other RNA
gcaggggctactgtccccttg

SEQ ID NO: 7534 - RNA, 21 nt, synthetic construct
  misc_feature 1..21: note = Synthetic
  source 1..21: mol_type = other RNA
gcaggtaaacttgggcgagtg

SEQ ID NO: 7535 - RNA, 21 nt, synthetic construct
  misc_feature 1..21: note = Synthetic
  source 1..21: mol_type = other RNA
gcaggtgacagacaagcacgt

SEQ ID NO: 7536 - RNA, 21 nt, synthetic construct
  misc_feature 1..21: note = Synthetic
  source 1..21: mol_type = other RNA
gcaggtggagctgttgcactg

SEQ ID NO: 7537 - RNA, 21 nt, synthetic construct
  misc_feature 1..21: note = Synthetic
  source 1..21: mol_type = other RNA
gcaggtgtcgggatcctgaca

SEQ ID NO: 7538 - RNA, 21 nt, synthetic construct
  misc_feature 1..21: note = Synthetic
  source 1..21: mol_type = other RNA
gcagtcatattcccggtcaca

SEQ ID NO: 7539 - RNA, 21 nt, synthetic construct
  misc_feature 1..21: note = Synthetic
  source 1..21: mol_type = other RNA
gcagtccacttggccatcgca

SEQ ID NO: 7540 - RNA, 21 nt, synthetic construct
  misc_feature 1..21: note = Synthetic
  source 1..21: mol_type = other RNA
gcagtccccgccgcggcgagg

SEQ ID NO: 7541 - RNA, 21 nt, synthetic construct
  misc_feature 1..21: note = Synthetic
  source 1..21: mol_type = other RNA
gcagtcccggtctgagtcaca

SEQ ID NO: 7542 - RNA, 21 nt, synthetic construct
  misc_feature 1..21: note = Synthetic
  source 1..21: mol_type = other RNA
gcagtcggggccaccatcaca

SEQ ID NO: 7543 - RNA, 21 nt, synthetic construct
  misc_feature 1..21: note = Synthetic
  source 1..21: mol_type = other RNA
gcagtcggggtcgttgtcgca

SEQ ID NO: 7544 - RNA, 21 nt, synthetic construct
  misc_feature 1..21: note = Synthetic
  source 1..21: mol_type = other RNA
gcagtctctagccatgttgca

SEQ ID NO: 7545 - RNA, 21 nt, synthetic construct
  misc_feature 1..21: note = Synthetic
  source 1..21: mol_type = other RNA
gcagtggaactcgaaggccga

SEQ ID NO: 7546 - RNA, 21 nt, synthetic construct
  misc_feature 1..21: note = Synthetic
  source 1..21: mol_type = other RNA
gcagtggcataatcatagctc

SEQ ID NO: 7547 - RNA, 21 nt, synthetic construct
  misc_feature 1..21: note = Synthetic
  source 1..21: mol_type = other RNA
gcagtggcgcaatctcggctc

SEQ ID NO: 7548 - RNA, 21 nt, synthetic construct
  misc_feature 1..21: note = Synthetic
  source 1..21: mol_type = other RNA
gcagtggctcgatcatggctc

SEQ ID NO: 7549 - RNA, 21 nt, synthetic construct
  misc_feature 1..21: note = Synthetic
  source 1..21: mol_type = other RNA
gcagtgtcccgacccggatca

SEQ ID NO: 7550 - RNA, 21 nt, synthetic construct
  misc_feature 1..21: note = Synthetic
  source 1..21: mol_type = other RNA
gcagttctcgatattcacgat

SEQ ID NO: 7551 - RNA, 21 nt, synthetic construct
  misc_feature 1..21: note = Synthetic
  source 1..21: mol_type = other RNA
gcagtttccatcagagcactg

SEQ ID NO: 7552 - RNA, 21 nt, synthetic construct
  misc_feature 1..21: note = Synthetic
  source 1..21: mol_type = other RNA
gcagttttcctcgtcagattt

SEQ ID NO: 7553 - RNA, 21 nt, synthetic construct
  misc_feature 1..21: note = Synthetic
  source 1..21: mol_type = other RNA
gcataatcatagctcacgaca

SEQ ID NO: 7554 - RNA, 21 nt, synthetic construct
  misc_feature 1..21: note = Synthetic
  source 1..21: mol_type = other RNA
gcatagaagaggtaaacacgt

SEQ ID NO: 7555 - RNA, 21 nt, synthetic construct
  misc_feature 1..21: note = Synthetic
  source 1..21: mol_type = other RNA
gcatagaagtggaagcactag

SEQ ID NO: 7556 - RNA, 21 nt, synthetic construct
  misc_feature 1..21: note = Synthetic
  source 1..21: mol_type = other RNA
gcatcatttggtgaatgagtt

SEQ ID NO: 7557 - RNA, 21 nt, synthetic construct
  misc_feature 1..21: note = Synthetic
  source 1..21: mol_type = other RNA
gcatctgtcgcccacgtggct

SEQ ID NO: 7558 - RNA, 21 nt, synthetic construct
  misc_feature 1..21: note = Synthetic
  source 1..21: mol_type = other RNA
gcatctgtcgcccactgcagt

SEQ ID NO: 7559 - RNA, 21 nt, synthetic construct
  misc_feature 1..21: note = Synthetic
  source 1..21: mol_type = other RNA
gcatcttcgctgggccaccag

SEQ ID NO: 7560 - RNA, 21 nt, synthetic construct
  misc_feature 1..21: note = Synthetic
  source 1..21: mol_type = other RNA
gcatgccgtccgggcaggcgc

SEQ ID NO: 7561 - RNA, 21 nt, synthetic construct
  misc_feature 1..21: note = Synthetic
  source 1..21: mol_type = other RNA
gcatgggcactgtccgaagcc

SEQ ID NO: 7562 - RNA, 21 nt, synthetic construct
  misc_feature 1..21: note = Synthetic
  source 1..21: mol_type = other RNA
gcatggtttttttttgttttt

SEQ ID NO: 7563 - RNA, 21 nt, synthetic construct
  misc_feature 1..21: note = Synthetic
  source 1..21: mol_type = other RNA
gcatgttttaaacacataccc

SEQ ID NO: 7564 - RNA, 21 nt, synthetic construct
  misc_feature 1..21: note = Synthetic
  source 1..21: mol_type = other RNA
gcattcattgacacgggcttt

SEQ ID NO: 7565 - RNA, 21 nt, synthetic construct
  misc_feature 1..21: note = Synthetic
  source 1..21: mol_type = other RNA
gcattcgccgctgtgacactt

SEQ ID NO: 7566 - RNA, 21 nt, synthetic construct
  misc_feature 1..21: note = Synthetic
  source 1..21: mol_type = other RNA
gcattcgttggtcccgcactc

SEQ ID NO: 7567 - RNA, 21 nt, synthetic construct
  misc_feature 1..21: note = Synthetic
  source 1..21: mol_type = other RNA
gcatttacgtgctccgaaacc

SEQ ID NO: 7568 - RNA, 21 nt, synthetic construct
  misc_feature 1..21: note = Synthetic
  source 1..21: mol_type = other RNA
gcatttcagaggcaataaccc

SEQ ID NO: 7569 - RNA, 21 nt, synthetic construct
  misc_feature 1..21: note = Synthetic
  source 1..21: mol_type = other RNA
gcatttcccgtcttggcactg

SEQ ID NO: 7570 - RNA, 21 nt, synthetic construct
  misc_feature 1..21: note = Synthetic
  source 1..21: mol_type = other RNA
gcatttgcatagaagtggaag

SEQ ID NO: 7571 - RNA, 21 nt, synthetic construct
  misc_feature 1..21: note = Synthetic
  source 1..21: mol_type = other RNA
gccaaatgtacacagtgtaca

SEQ ID NO: 7572 - RNA, 21 nt, synthetic construct
  misc_feature 1..21: note = Synthetic
  source 1..21: mol_type = other RNA
gccaaattcattttttaagag

SEQ ID NO: 7573 - RNA, 21 nt, synthetic construct
  misc_feature 1..21: note = Synthetic
  source 1..21: mol_type = other RNA
gccaacaagttgacatcggaa

SEQ ID NO: 7574 - RNA, 21 nt, synthetic construct
  misc_feature 1..21: note = Synthetic
  source 1..21: mol_type = other RNA
gccaacttcatcgctcatgtc

SEQ ID NO: 7575 - RNA, 21 nt, synthetic construct
  misc_feature 1..21: note = Synthetic
  source 1..21: mol_type = other RNA
gccaaggagaaggggtgggcc

SEQ ID NO: 7576 - RNA, 21 nt, synthetic construct
  misc_feature 1..21: note = Synthetic
  source 1..21: mol_type = other RNA
gccaaggtaaccgggtgtctc

SEQ ID NO: 7577 - RNA, 21 nt, synthetic construct
  misc_feature 1..21: note = Synthetic
  source 1..21: mol_type = other RNA
gccaatcccttgtgacatctt

SEQ ID NO: 7578 - RNA, 21 nt, synthetic construct
  misc_feature 1..21: note = Synthetic
  source 1..21: mol_type = other RNA
gccacacctgggtgcaggcca

SEQ ID NO: 7579 - RNA, 21 nt, synthetic construct
  misc_feature 1..21: note = Synthetic
  source 1..21: mol_type = other RNA
gccacagagcacagcggaaac

SEQ ID NO: 7580 - RNA, 21 nt, synthetic construct
  misc_feature 1..21: note = Synthetic
  source 1..21: mol_type = other RNA
gccacagcgcagttttcctcg

SEQ ID NO: 7581 - RNA, 21 nt, synthetic construct
  misc_feature 1..21: note = Synthetic
  source 1..21: mol_type = other RNA
gccacaggacagccttgctcg

SEQ ID NO: 7582 - RNA, 21 nt, synthetic construct
  misc_feature 1..21: note = Synthetic
  source 1..21: mol_type = other RNA
gccaccacgcccggctaattt

SEQ ID NO: 7583 - RNA, 21 nt, synthetic construct
  misc_feature 1..21: note = Synthetic
  source 1..21: mol_type = other RNA
gccaccacggattcagccaga

SEQ ID NO: 7584 - RNA, 21 nt, synthetic construct
  misc_feature 1..21: note = Synthetic
  source 1..21: mol_type = other RNA
gccaccagctggaagccgtcg

SEQ ID NO: 7585 - RNA, 21 nt, synthetic construct
  misc_feature 1..21: note = Synthetic
  source 1..21: mol_type = other RNA
gccaccatcacagcgccagct

SEQ ID NO: 7586 - RNA, 21 nt, synthetic construct
  misc_feature 1..21: note = Synthetic
  source 1..21: mol_type = other RNA
gccaccctccaggttcacgca

SEQ ID NO: 7587 - RNA, 21 nt, synthetic construct
  misc_feature 1..21: note = Synthetic
  source 1..21: mol_type = other RNA
gccaccgtacccagctgattt

SEQ ID NO: 7588 - RNA, 21 nt, synthetic construct
  misc_feature 1..21: note = Synthetic
  source 1..21: mol_type = other RNA
gccacctccgtgtccagagcg

SEQ ID NO: 7589 - RNA, 21 nt, synthetic construct
  misc_feature 1..21: note = Synthetic
  source 1..21: mol_type = other RNA
gccacgtcatcctccagactg

SEQ ID NO: 7590 - RNA, 21 nt, synthetic construct
  misc_feature 1..21: note = Synthetic
  source 1..21: mol_type = other RNA
gccacgtgtcctcacggccaa

SEQ ID NO: 7591 - RNA, 21 nt, synthetic construct
  misc_feature 1..21: note = Synthetic
  source 1..21: mol_type = other RNA
gccactcatacatacaacggg

SEQ ID NO: 7592 - RNA, 21 nt, synthetic construct
  misc_feature 1..21: note = Synthetic
  source 1..21: mol_type = other RNA
gccactcatccgagccatctt

SEQ ID NO: 7593 - RNA, 21 nt, synthetic construct
  misc_feature 1..21: note = Synthetic
  source 1..21: mol_type = other RNA
gccactgaatgttttcagtca

SEQ ID NO: 7594 - RNA, 21 nt, synthetic construct
  misc_feature 1..21: note = Synthetic
  source 1..21: mol_type = other RNA
gccactgaggagatctagggt

SEQ ID NO: 7595 - RNA, 21 nt, synthetic construct
  misc_feature 1..21: note = Synthetic
  source 1..21: mol_type = other RNA
gccactgcagcctcagcctct

SEQ ID NO: 7596 - RNA, 21 nt, synthetic construct
  misc_feature 1..21: note = Synthetic
  source 1..21: mol_type = other RNA
gccactgcgcccggcctcacc

SEQ ID NO: 7597 - RNA, 21 nt, synthetic construct
  misc_feature 1..21: note = Synthetic
  source 1..21: mol_type = other RNA
gccacttaggcagtggaactc

SEQ ID NO: 7598 - RNA, 21 nt, synthetic construct
  misc_feature 1..21: note = Synthetic
  source 1..21: mol_type = other RNA
gccacttgcttctctgggcct

SEQ ID NO: 7599 - RNA, 21 nt, synthetic construct
  misc_feature 1..21: note = Synthetic
  source 1..21: mol_type = other RNA
gccagactgcggactgcagtg

SEQ ID NO: 7600 - RNA, 21 nt, synthetic construct
  misc_feature 1..21: note = Synthetic
  source 1..21: mol_type = other RNA
gccagaggccatgggctgctg

SEQ ID NO: 7601 - RNA, 21 nt, synthetic construct
  misc_feature 1..21: note = Synthetic
  source 1..21: mol_type = other RNA
gccagatcatttccgacgcca

SEQ ID NO: 7602 - RNA, 21 nt, synthetic construct
  misc_feature 1..21: note = Synthetic
  source 1..21: mol_type = other RNA
gccagcaacgtcgcccagagc

SEQ ID NO: 7603 - RNA, 21 nt, synthetic construct
  misc_feature 1..21: note = Synthetic
  source 1..21: mol_type = other RNA
gccagcagcatgccgtccggg

SEQ ID NO: 7604 - RNA, 21 nt, synthetic construct
  misc_feature 1..21: note = Synthetic
  source 1..21: mol_type = other RNA
gccagcccgtcgggggcctgg

SEQ ID NO: 7605 - RNA, 21 nt, synthetic construct
  misc_feature 1..21: note = Synthetic
  source 1..21: mol_type = other RNA
gccagcctcttttcatcctcc

SEQ ID NO: 7606 - RNA, 21 nt, synthetic construct
  misc_feature 1..21: note = Synthetic
  source 1..21: mol_type = other RNA
gccagctggagtggatgcact

SEQ ID NO: 7607 - RNA, 21 nt, synthetic construct
  misc_feature 1..21: note = Synthetic
  source 1..21: mol_type = other RNA
gccaggagggcccaggataac

SEQ ID NO: 7608 - RNA, 21 nt, synthetic construct
  misc_feature 1..21: note = Synthetic
  source 1..21: mol_type = other RNA
gccaggatggtctcgatctcc

SEQ ID NO: 7609 - RNA, 21 nt, synthetic construct
  misc_feature 1..21: note = Synthetic
  source 1..21: mol_type = other RNA
gccaggcagtgtcccgacccg

SEQ ID NO: 7610 - RNA, 21 nt, synthetic construct
  misc_feature 1..21: note = Synthetic
  source 1..21: mol_type = other RNA
gccagggggtcccgttggtgc

SEQ ID NO: 7611 - RNA, 21 nt, synthetic construct
  misc_feature 1..21: note = Synthetic
  source 1..21: mol_type = other RNA
gccagttcttccatagaagga

SEQ ID NO: 7612 - RNA, 21 nt, synthetic construct
  misc_feature 1..21: note = Synthetic
  source 1..21: mol_type = other RNA
gccatcctggcactcagcgct

SEQ ID NO: 7613 - RNA, 21 nt, synthetic construct
  misc_feature 1..21: note = Synthetic
  source 1..21: mol_type = other RNA
gccatcgcacctccagaactg

SEQ ID NO: 7614 - RNA, 21 nt, synthetic construct
  misc_feature 1..21: note = Synthetic
  source 1..21: mol_type = other RNA
gccatcgcagacccacttgta

SEQ ID NO: 7615 - RNA, 21 nt, synthetic construct
  misc_feature 1..21: note = Synthetic
  source 1..21: mol_type = other RNA
gccatctgctgttgtgtgttg

SEQ ID NO: 7616 - RNA, 21 nt, synthetic construct
  misc_feature 1..21: note = Synthetic
  source 1..21: mol_type = other RNA
gccatcttcgcagtcggggtc

SEQ ID NO: 7617 - RNA, 21 nt, synthetic construct
  misc_feature 1..21: note = Synthetic
  source 1..21: mol_type = other RNA
gccatgaacaggatccaccac

SEQ ID NO: 7618 - RNA, 21 nt, synthetic construct
  misc_feature 1..21: note = Synthetic
  source 1..21: mol_type = other RNA
gccatgaatccctttcctggc

SEQ ID NO: 7619 - RNA, 21 nt, synthetic construct
  misc_feature 1..21: note = Synthetic
  source 1..21: mol_type = other RNA
gccatgcctggccagaggcca

SEQ ID NO: 7620 - RNA, 21 nt, synthetic construct
  misc_feature 1..21: note = Synthetic
  source 1..21: mol_type = other RNA
gccatggatgcagtttccatc

SEQ ID NO: 7621 - RNA, 21 nt, synthetic construct
  misc_feature 1..21: note = Synthetic
  source 1..21: mol_type = other RNA
gccatgggctgctgatgcacc

SEQ ID NO: 7622 - RNA, 21 nt, synthetic construct
  misc_feature 1..21: note = Synthetic
  source 1..21: mol_type = other RNA
gccatgttgcagactttgtcc

SEQ ID NO: 7623 - RNA, 21 nt, synthetic construct
  misc_feature 1..21: note = Synthetic
  source 1..21: mol_type = other RNA
gccattgcatgggcactgtcc

SEQ ID NO: 7624 - RNA, 21 nt, synthetic construct
  misc_feature 1..21: note = Synthetic
  source 1..21: mol_type = other RNA
gccattgctcagggtggtcct

SEQ ID NO: 7625 - RNA, 21 nt, synthetic construct
  misc_feature 1..21: note = Synthetic
  source 1..21: mol_type = other RNA
gccattgggccactgaatgtt

SEQ ID NO: 7626 - RNA, 21 nt, synthetic construct
  misc_feature 1..21: note = Synthetic
  source 1..21: mol_type = other RNA
gcccacagccttgcaggcctt

SEQ ID NO: 7627 - RNA, 21 nt, synthetic construct
  misc_feature 1..21: note = Synthetic
  source 1..21: mol_type = other RNA
gcccacagctgggggatgcag

SEQ ID NO: 7628 - RNA, 21 nt, synthetic construct
  misc_feature 1..21: note = Synthetic
  source 1..21: mol_type = other RNA
gcccacgtggctgaagatctc

SEQ ID NO: 7629 - RNA, 21 nt, synthetic construct
  misc_feature 1..21: note = Synthetic
  source 1..21: mol_type = other RNA
gcccactgcagtccccgccgc

SEQ ID NO: 7630 - RNA, 21 nt, synthetic construct
  misc_feature 1..21: note = Synthetic
  source 1..21: mol_type = other RNA
gcccagagcttggtgagacat

SEQ ID NO: 7631 - RNA, 21 nt, synthetic construct
  misc_feature 1..21: note = Synthetic
  source 1..21: mol_type = other RNA
gcccaggacagagtcggtcca

SEQ ID NO: 7632 - RNA, 21 nt, synthetic construct
  misc_feature 1..21: note = Synthetic
  source 1..21: mol_type = other RNA
gcccaggataacggagggcga

SEQ ID NO: 7633 - RNA, 21 nt, synthetic construct
  misc_feature 1..21: note = Synthetic
  source 1..21: mol_type = other RNA
gcccaggccagactgcggact

SEQ ID NO: 7634 - RNA, 21 nt, synthetic construct
  misc_feature 1..21: note = Synthetic
  source 1..21: mol_type = other RNA
gcccaggctggaaagcagtgg

SEQ ID NO: 7635 - RNA, 21 nt, synthetic construct
  misc_feature 1..21: note = Synthetic
  source 1..21: mol_type = other RNA
gcccaggctggagtgcagtgg

SEQ ID NO: 7636 - RNA, 21 nt, synthetic construct
  misc_feature 1..21: note = Synthetic
  source 1..21: mol_type = other RNA
gcccaggggtggccccaggca

SEQ ID NO: 7637 - RNA, 21 nt, synthetic construct
  misc_feature 1..21: note = Synthetic
  source 1..21: mol_type = other RNA
gccccaggcagccgggaggtg

SEQ ID NO: 7638 - RNA, 21 nt, synthetic construct
  misc_feature 1..21: note = Synthetic
  source 1..21: mol_type = other RNA
gccccagggccccatgctcgc

SEQ ID NO: 7639 - RNA, 21 nt, synthetic construct
  misc_feature 1..21: note = Synthetic
  source 1..21: mol_type = other RNA
gccccatgctcgcagcctctg

SEQ ID NO: 7640 - RNA, 21 nt, synthetic construct
  misc_feature 1..21: note = Synthetic
  source 1..21: mol_type = other RNA
gcccccacagctgaagtcccc

SEQ ID NO: 7641 - RNA, 21 nt, synthetic construct
  misc_feature 1..21: note = Synthetic
  source 1..21: mol_type = other RNA
gccccccaggacaaggtgggg

SEQ ID NO: 7642 - RNA, 21 nt, synthetic construct
  misc_feature 1..21: note = Synthetic
  source 1..21: mol_type = other RNA
gcccccgagaccagagaccca

SEQ ID NO: 7643 - RNA, 21 nt, synthetic construct
  misc_feature 1..21: note = Synthetic
  source 1..21: mol_type = other RNA
gcccccgttgacatcgatgct

SEQ ID NO: 7644 - RNA, 21 nt, synthetic construct
  misc_feature 1..21: note = Synthetic
  source 1..21: mol_type = other RNA
gccccctttcttgatcttggc

SEQ ID NO: 7645 - RNA, 21 nt, synthetic construct
  misc_feature 1..21: note = Synthetic
  source 1..21: mol_type = other RNA
gccccgagaatagtcactgaa

SEQ ID NO: 7646 - RNA, 21 nt, synthetic construct
  misc_feature 1..21: note = Synthetic
  source 1..21: mol_type = other RNA
gcccctctctgtccccggcat

SEQ ID NO: 7647 - RNA, 21 nt, synthetic construct
  misc_feature 1..21: note = Synthetic
  source 1..21: mol_type = other RNA
gcccctctgtgaacttgatcg

SEQ ID NO: 7648 - RNA, 21 nt, synthetic construct
  misc_feature 1..21: note = Synthetic
  source 1..21: mol_type = other RNA
gcccgccaccacgcccggcta

SEQ ID NO: 7649 - RNA, 21 nt, synthetic construct
  misc_feature 1..21: note = Synthetic
  source 1..21: mol_type = other RNA
gcccggcctcaccgtgcatgt

SEQ ID NO: 7650 - RNA, 21 nt, synthetic construct
  misc_feature 1..21: note = Synthetic
  source 1..21: mol_type = other RNA
gcccggctaattttttgtatt

SEQ ID NO: 7651 - RNA, 21 nt, synthetic construct
  misc_feature 1..21: note = Synthetic
  source 1..21: mol_type = other RNA
gcccgtcgggggcctggatgt

SEQ ID NO: 7652 - RNA, 21 nt, synthetic construct
  misc_feature 1..21: note = Synthetic
  source 1..21: mol_type = other RNA
gccctcacgctactgggcttc

SEQ ID NO: 7653 - RNA, 21 nt, synthetic construct
  misc_feature 1..21: note = Synthetic
  source 1..21: mol_type = other RNA
gcccttggcttggagccgttc

SEQ ID NO: 7654 - RNA, 21 nt, synthetic construct
  misc_feature 1..21: note = Synthetic
  source 1..21: mol_type = other RNA
gcccttggtatccgcaacaga

SEQ ID NO: 7655 - RNA, 21 nt, synthetic construct
  misc_feature 1..21: note = Synthetic
  source 1..21: mol_type = other RNA
gccgagagatgcacttcccat

SEQ ID NO: 7656 - RNA, 21 nt, synthetic construct
  misc_feature 1..21: note = Synthetic
  source 1..21: mol_type = other RNA
gccgagcaggggctactgtcc

SEQ ID NO: 7657 - RNA, 21 nt, synthetic construct
  misc_feature 1..21: note = Synthetic
  source 1..21: mol_type = other RNA
gccgatcttaaggtcattgca

SEQ ID NO: 7658 - RNA, 21 nt, synthetic construct
  misc_feature 1..21: note = Synthetic
  source 1..21: mol_type = other RNA
gccgccagttcttccatagaa

SEQ ID NO: 7659 - RNA, 21 nt, synthetic construct
  misc_feature 1..21: note = Synthetic
  source 1..21: mol_type = other RNA
gccgccattgctcagggtggt

SEQ ID NO: 7660 - RNA, 21 nt, synthetic construct
  misc_feature 1..21: note = Synthetic
  source 1..21: mol_type = other RNA
gccgccgttgttgtccaagca

SEQ ID NO: 7661 - RNA, 21 nt, synthetic construct
  misc_feature 1..21: note = Synthetic
  source 1..21: mol_type = other RNA
gccgcggcgaggagcaaggcg

SEQ ID NO: 7662 - RNA, 21 nt, synthetic construct
  misc_feature 1..21: note = Synthetic
  source 1..21: mol_type = other RNA
gccgctgtgacacttgaactt

SEQ ID NO: 7663 - RNA, 21 nt, synthetic construct
  misc_feature 1..21: note = Synthetic
  source 1..21: mol_type = other RNA
gccggcgaggtctcaggaagg

SEQ ID NO: 7664 - RNA, 21 nt, synthetic construct
  misc_feature 1..21: note = Synthetic
  source 1..21: mol_type = other RNA
gccggctgccatggatgcagt

SEQ ID NO: 7665 - RNA, 21 nt, synthetic construct
  misc_feature 1..21: note = Synthetic
  source 1..21: mol_type = other RNA
gccgggaggtgtcgggaacag

SEQ ID NO: 7666 - RNA, 21 nt, synthetic construct
  misc_feature 1..21: note = Synthetic
  source 1..21: mol_type = other RNA
gccgggggcccctctgtgaac

SEQ ID NO: 7667 - RNA, 21 nt, synthetic construct
  misc_feature 1..21: note = Synthetic
  source 1..21: mol_type = other RNA
gccggttggtgaagaagaggt

SEQ ID NO: 7668 - RNA, 21 nt, synthetic construct
  misc_feature 1..21: note = Synthetic
  source 1..21: mol_type = other RNA
gccgtccaagcagtcccggtc

SEQ ID NO: 7669 - RNA, 21 nt, synthetic construct
  misc_feature 1..21: note = Synthetic
  source 1..21: mol_type = other RNA
gccgtccgggcaggcgcaggt

SEQ ID NO: 7670 - RNA, 21 nt, synthetic construct
  misc_feature 1..21: note = Synthetic
  source 1..21: mol_type = other RNA
gccgtcctggttgtggcaaat

SEQ ID NO: 7671 - RNA, 21 nt, synthetic construct
  misc_feature 1..21: note = Synthetic
  source 1..21: mol_type = other RNA
gccgtcggggcacaggcactc

SEQ ID NO: 7672 - RNA, 21 nt, synthetic construct
  misc_feature 1..21: note = Synthetic
  source 1..21: mol_type = other RNA
gccgtgggctctgtcaagctg

SEQ ID NO: 7673 - RNA, 21 nt, synthetic construct
  misc_feature 1..21: note = Synthetic
  source 1..21: mol_type = other RNA
gccgttctccctgaataacgt

SEQ ID NO: 7674 - RNA, 21 nt, synthetic construct
  misc_feature 1..21: note = Synthetic
  source 1..21: mol_type = other RNA
gccgttgtcgcagtccacttg

SEQ ID NO: 7675 - RNA, 21 nt, synthetic construct
  misc_feature 1..21: note = Synthetic
  source 1..21: mol_type = other RNA
gccgttgttgtccaagcattc

SEQ ID NO: 7676 - RNA, 21 nt, synthetic construct
  misc_feature 1..21: note = Synthetic
  source 1..21: mol_type = other RNA
gcctcaaatgcctgagctcaa

SEQ ID NO: 7677 - RNA, 21 nt, synthetic construct
  misc_feature 1..21: note = Synthetic
  source 1..21: mol_type = other RNA
gcctcaccgtgcatgttttaa

SEQ ID NO: 7678 - RNA, 21 nt, synthetic construct
  misc_feature 1..21: note = Synthetic
  source 1..21: mol_type = other RNA
gcctcagcctcccaagtagct

SEQ ID NO: 7679 - RNA, 21 nt, synthetic construct
  misc_feature 1..21: note = Synthetic
  source 1..21: mol_type = other RNA
gcctcagcctcccgagtagct

SEQ ID NO: 7680 - RNA, 21 nt, synthetic construct
  misc_feature 1..21: note = Synthetic
  source 1..21: mol_type = other RNA
gcctcagcctctcttggctgg

SEQ ID NO: 7681 - RNA, 21 nt, synthetic construct
  misc_feature 1..21: note = Synthetic
  source 1..21: mol_type = other RNA
gcctcagcctctgtgaggcag

SEQ ID NO: 7682 - RNA, 21 nt, synthetic construct
  misc_feature 1..21: note = Synthetic
  source 1..21: mol_type = other RNA
gcctcccaaagtgctgggatt

SEQ ID NO: 7683 - RNA, 21 nt, synthetic construct
  misc_feature 1..21: note = Synthetic
  source 1..21: mol_type = other RNA
gcctcccaagtagctgggatc

SEQ ID NO: 7684 - RNA, 21 nt, synthetic construct
  misc_feature 1..21: note = Synthetic
  source 1..21: mol_type = other RNA
gcctcccagatgaataaatat

SEQ ID NO: 7685 - RNA, 21 nt, synthetic construct
  misc_feature 1..21: note = Synthetic
  source 1..21: mol_type = other RNA
gcctcccgagtagctgggact

SEQ ID NO: 7686 - RNA, 21 nt, synthetic construct
  misc_feature 1..21: note = Synthetic
  source 1..21: mol_type = other RNA
gcctcgccatgcctggccaga

SEQ ID NO: 7687 - RNA, 21 nt, synthetic construct
  misc_feature 1..21: note = Synthetic
  source 1..21: mol_type = other RNA
gcctcggcctcccaaagtgct

SEQ ID NO: 7688 - RNA, 21 nt, synthetic construct
  misc_feature 1..21: note = Synthetic
  source 1..21: mol_type = other RNA
gcctcgtctgagccgtccaag

SEQ ID NO: 7689 - RNA, 21 nt, synthetic construct
  misc_feature 1..21: note = Synthetic
  source 1..21: mol_type = other RNA
gcctctcttggctgggtgagg

SEQ ID NO: 7690 - RNA, 21 nt, synthetic construct
  misc_feature 1..21: note = Synthetic
  source 1..21: mol_type = other RNA
gcctctgccaggcagtgtccc

SEQ ID NO: 7691 - RNA, 21 nt, synthetic construct
  misc_feature 1..21: note = Synthetic
  source 1..21: mol_type = other RNA
gcctctgggaagtggcatcat

SEQ ID NO: 7692 - RNA, 21 nt, synthetic construct
  misc_feature 1..21: note = Synthetic
  source 1..21: mol_type = other RNA
gcctctgtgaggcagctcctc

SEQ ID NO: 7693 - RNA, 21 nt, synthetic construct
  misc_feature 1..21: note = Synthetic
  source 1..21: mol_type = other RNA
gcctcttttcatcctccaaga

SEQ ID NO: 7694 - RNA, 21 nt, synthetic construct
  misc_feature 1..21: note = Synthetic
  source 1..21: mol_type = other RNA
gcctgacatcccctccccttt

SEQ ID NO: 7695 - RNA, 21 nt, synthetic construct
  misc_feature 1..21: note = Synthetic
  source 1..21: mol_type = other RNA
gcctgacggtggatgtctcct

SEQ ID NO: 7696 - RNA, 21 nt, synthetic construct
  misc_feature 1..21: note = Synthetic
  source 1..21: mol_type = other RNA
gcctgagctcaaaccatcctc

SEQ ID NO: 7697 - RNA, 21 nt, synthetic construct
  misc_feature 1..21: note = Synthetic
  source 1..21: mol_type = other RNA
gcctggatgtctctgctgatg

SEQ ID NO: 7698 - RNA, 21 nt, synthetic construct
  misc_feature 1..21: note = Synthetic
  source 1..21: mol_type = other RNA
gcctggccagaggccatgggc

SEQ ID NO: 7699 - RNA, 21 nt, synthetic construct
  misc_feature 1..21: note = Synthetic
  source 1..21: mol_type = other RNA
gcctgggatcccatcccaaca

SEQ ID NO: 7700 - RNA, 21 nt, synthetic construct
  misc_feature 1..21: note = Synthetic
  source 1..21: mol_type = other RNA
gcctggtctccaactcctgaa

SEQ ID NO: 7701 - RNA, 21 nt, synthetic construct
  misc_feature 1..21: note = Synthetic
  source 1..21: mol_type = other RNA
gcctgttctgcctcccagatg

SEQ ID NO: 7702 - RNA, 21 nt, synthetic construct
  misc_feature 1..21: note = Synthetic
  source 1..21: mol_type = other RNA
gcctgtttctcttatccttca

SEQ ID NO: 7703 - RNA, 21 nt, synthetic construct
  misc_feature 1..21: note = Synthetic
  source 1..21: mol_type = other RNA
gccttcctcacactggcactt

SEQ ID NO: 7704 - RNA, 21 nt, synthetic construct
  misc_feature 1..21: note = Synthetic
  source 1..21: mol_type = other RNA
gccttcgtgtgggggtccagc

SEQ ID NO: 7705 - RNA, 21 nt, synthetic construct
  misc_feature 1..21: note = Synthetic
  source 1..21: mol_type = other RNA
gccttgagggtggccgggggc

SEQ ID NO: 7706 - RNA, 21 nt, synthetic construct
  misc_feature 1..21: note = Synthetic
  source 1..21: mol_type = other RNA
gccttgcaggccttcgtgtgg

SEQ ID NO: 7707 - RNA, 21 nt, synthetic construct
  misc_feature 1..21: note = Synthetic
  source 1..21: mol_type = other RNA
gccttgctcgtctgagccgtt

SEQ ID NO: 7708 - RNA, 21 nt, synthetic construct
  misc_feature 1..21: note = Synthetic
  source 1..21: mol_type = other RNA
gcctttgtgacaggaaccgcg

SEQ ID NO: 7709 - RNA, 21 nt, synthetic construct
  misc_feature 1..21: note = Synthetic
  source 1..21: mol_type = other RNA
gcgaaactcgtcctgggagca

SEQ ID NO: 7710 - RNA, 21 nt, synthetic construct
  misc_feature 1..21: note = Synthetic
  source 1..21: mol_type = other RNA
gcgacaggtggccacagcgca

SEQ ID NO: 7711 - RNA, 21 nt, synthetic construct
  misc_feature 1..21: note = Synthetic
  source 1..21: mol_type = other RNA
gcgacaggtggccacaggaca

SEQ ID NO: 7712 - RNA, 21 nt, synthetic construct
  misc_feature 1..21: note = Synthetic
  source 1..21: mol_type = other RNA
gcgaccacgttcctcaggttg

SEQ ID NO: 7713 - RNA, 21 nt, synthetic construct
  misc_feature 1..21: note = Synthetic
  source 1..21: mol_type = other RNA
gcgacggtccagcgcaatttc

SEQ ID NO: 7714 - RNA, 21 nt, synthetic construct
  misc_feature 1..21: note = Synthetic
  source 1..21: mol_type = other RNA
gcgactcgtgtatgtcgcgga

SEQ ID NO: 7715 - RNA, 21 nt, synthetic construct
  misc_feature 1..21: note = Synthetic
  source 1..21: mol_type = other RNA
gcgaggagcaaggcgacggtc

SEQ ID NO: 7716 - RNA, 21 nt, synthetic construct
  misc_feature 1..21: note = Synthetic
  source 1..21: mol_type = other RNA
gcgagggcgccccccaggaca

SEQ ID NO: 7717 - RNA, 21 nt, synthetic construct
  misc_feature 1..21: note = Synthetic
  source 1..21: mol_type = other RNA
gcgaggtctcaggaagggttc

SEQ ID NO: 7718 - RNA, 21 nt, synthetic construct
  misc_feature 1..21: note = Synthetic
  source 1..21: mol_type = other RNA
gcgagtagatgtccacaccat

SEQ ID NO: 7719 - RNA, 21 nt, synthetic construct
  misc_feature 1..21: note = Synthetic
  source 1..21: mol_type = other RNA
gcgagtgggggttgatctgcg

SEQ ID NO: 7720 - RNA, 21 nt, synthetic construct
  misc_feature 1..21: note = Synthetic
  source 1..21: mol_type = other RNA
gcgatcctcctgcctcagcct

SEQ ID NO: 7721 - RNA, 21 nt, synthetic construct
  misc_feature 1..21: note = Synthetic
  source 1..21: mol_type = other RNA
gcgatggagcccacagccttg

SEQ ID NO: 7722 - RNA, 21 nt, synthetic construct
  misc_feature 1..21: note = Synthetic
  source 1..21: mol_type = other RNA
gcgatggggaggacaatggac

SEQ ID NO: 7723 - RNA, 21 nt, synthetic construct
  misc_feature 1..21: note = Synthetic
  source 1..21: mol_type = other RNA
gcgatttcagaaagaacctga

SEQ ID NO: 7724 - RNA, 21 nt, synthetic construct
  misc_feature 1..21: note = Synthetic
  source 1..21: mol_type = other RNA
gcgcaatctcggctcactgca

SEQ ID NO: 7725 - RNA, 21 nt, synthetic construct
  misc_feature 1..21: note = Synthetic
  source 1..21: mol_type = other RNA
gcgcaatttccagccccaggg

SEQ ID NO: 7726 - RNA, 21 nt, synthetic construct
  misc_feature 1..21: note = Synthetic
  source 1..21: mol_type = other RNA
gcgcaggtaaacttgggcgag

SEQ ID NO: 7727 - RNA, 21 nt, synthetic construct
  misc_feature 1..21: note = Synthetic
  source 1..21: mol_type = other RNA
gcgcagttttcctcgtcagat

SEQ ID NO: 7728 - RNA, 21 nt, synthetic construct
  misc_feature 1..21: note = Synthetic
  source 1..21: mol_type = other RNA
gcgccagctggagtggatgca

SEQ ID NO: 7729 - RNA, 21 nt, synthetic construct
  misc_feature 1..21: note = Synthetic
  source 1..21: mol_type = other RNA
gcgccccccaggacaaggtgg

SEQ ID NO: 7730 - RNA, 21 nt, synthetic construct
  misc_feature 1..21: note = Synthetic
  source 1..21: mol_type = other RNA
gcgcccggcctcaccgtgcat

SEQ ID NO: 7731 - RNA, 21 nt, synthetic construct
  misc_feature 1..21: note = Synthetic
  source 1..21: mol_type = other RNA
gcgctgccatcgcagacccac

SEQ ID NO: 7732 - RNA, 21 nt, synthetic construct
  misc_feature 1..21: note = Synthetic
  source 1..21: mol_type = other RNA
gcgctgcggccactcatccga

SEQ ID NO: 7733 - RNA, 21 nt, synthetic construct
  misc_feature 1..21: note = Synthetic
  source 1..21: mol_type = other RNA
gcggaaaccggggacttcgcc

SEQ ID NO: 7734 - RNA, 21 nt, synthetic construct
  misc_feature 1..21: note = Synthetic
  source 1..21: mol_type = other RNA
gcggacataaagacgacaatg

SEQ ID NO: 7735 - RNA, 21 nt, synthetic construct
  misc_feature 1..21: note = Synthetic
  source 1..21: mol_type = other RNA
gcggactgcagtggcgcaatc

SEQ ID NO: 7736 - RNA, 21 nt, synthetic construct
  misc_feature 1..21: note = Synthetic
  source 1..21: mol_type = other RNA
gcggaggaacgccaggcctcc

SEQ ID NO: 7737 - RNA, 21 nt, synthetic construct
  misc_feature 1..21: note = Synthetic
  source 1..21: mol_type = other RNA
gcggaggcggctccggggacc

SEQ ID NO: 7738 - RNA, 21 nt, synthetic construct
  misc_feature 1..21: note = Synthetic
  source 1..21: mol_type = other RNA
gcggccactcatccgagccat

SEQ ID NO: 7739 - RNA, 21 nt, synthetic construct
  misc_feature 1..21: note = Synthetic
  source 1..21: mol_type = other RNA
gcggccactgaggagatctag

SEQ ID NO: 7740 - RNA, 21 nt, synthetic construct
  misc_feature 1..21: note = Synthetic
  source 1..21: mol_type = other RNA
gcggcgaggagcaaggcgacg

SEQ ID NO: 7741 - RNA, 21 nt, synthetic construct
  misc_feature 1..21: note = Synthetic
  source 1..21: mol_type = other RNA
gcggctccggggacccgggac

SEQ ID NO: 7742 - RNA, 21 nt, synthetic construct
  misc_feature 1..21: note = Synthetic
  source 1..21: mol_type = other RNA
gcgggaccacaggtgagcacc

SEQ ID NO: 7743 - RNA, 21 nt, synthetic construct
  misc_feature 1..21: note = Synthetic
  source 1..21: mol_type = other RNA
gcgggagtctgacggaggctg

SEQ ID NO: 7744 - RNA, 21 nt, synthetic construct
  misc_feature 1..21: note = Synthetic
  source 1..21: mol_type = other RNA
gcgggagttccccagtcagtc

SEQ ID NO: 7745 - RNA, 21 nt, synthetic construct
  misc_feature 1..21: note = Synthetic
  source 1..21: mol_type = other RNA
gcggggagattctgaggcaac

SEQ ID NO: 7746 - RNA, 21 nt, synthetic construct
  misc_feature 1..21: note = Synthetic
  source 1..21: mol_type = other RNA
gcggggcagggaggcacagat

SEQ ID NO: 7747 - RNA, 21 nt, synthetic construct
  misc_feature 1..21: note = Synthetic
  source 1..21: mol_type = other RNA
gcggttgacacggcccccaca

SEQ ID NO: 7748 - RNA, 21 nt, synthetic construct
  misc_feature 1..21: note = Synthetic
  source 1..21: mol_type = other RNA
gcggttggcactgaaaatggc

SEQ ID NO: 7749 - RNA, 21 nt, synthetic construct
  misc_feature 1..21: note = Synthetic
  source 1..21: mol_type = other RNA
gcgtcatcttcctgacctcgt

SEQ ID NO: 7750 - RNA, 21 nt, synthetic construct
  misc_feature 1..21: note = Synthetic
  source 1..21: mol_type = other RNA
gcgtgagccactgcgcccggc

SEQ ID NO: 7751 - RNA, 21 nt, synthetic construct
  misc_feature 1..21: note = Synthetic
  source 1..21: mol_type = other RNA
gcgtgaggcacctgtgtctgg

SEQ ID NO: 7752 - RNA, 21 nt, synthetic construct
  misc_feature 1..21: note = Synthetic
  source 1..21: mol_type = other RNA
gcgttgcacacagtccagttc

SEQ ID NO: 7753 - RNA, 21 nt, synthetic construct
  misc_feature 1..21: note = Synthetic
  source 1..21: mol_type = other RNA
gctaacctggctgtctagcaa

SEQ ID NO: 7754 - RNA, 21 nt, synthetic construct
  misc_feature 1..21: note = Synthetic
  source 1..21: mol_type = other RNA
gctaattttttgtatttttag

SEQ ID NO: 7755 - RNA, 21 nt, synthetic construct
  misc_feature 1..21: note = Synthetic
  source 1..21: mol_type = other RNA
gctacaaaaaccttctataca

SEQ ID NO: 7756 - RNA, 21 nt, synthetic construct
  misc_feature 1..21: note = Synthetic
  source 1..21: mol_type = other RNA
gctactgggcttcttctcatt

SEQ ID NO: 7757 - RNA, 21 nt, synthetic construct
  misc_feature 1..21: note = Synthetic
  source 1..21: mol_type = other RNA
gctactgtccccttggaacac

SEQ ID NO: 7758 - RNA, 21 nt, synthetic construct
  misc_feature 1..21: note = Synthetic
  source 1..21: mol_type = other RNA
gctcaaaccatcctcccacct

SEQ ID NO: 7759 - RNA, 21 nt, synthetic construct
  misc_feature 1..21: note = Synthetic
  source 1..21: mol_type = other RNA
gctcacgacagcctcaaatgc

SEQ ID NO: 7760 - RNA, 21 nt, synthetic construct
  misc_feature 1..21: note = Synthetic
  source 1..21: mol_type = other RNA
gctcactgcaacctccacctc

SEQ ID NO: 7761 - RNA, 21 nt, synthetic construct
  misc_feature 1..21: note = Synthetic
  source 1..21: mol_type = other RNA
gctcactgcaagctccgcttc

SEQ ID NO: 7762 - RNA, 21 nt, synthetic construct
  misc_feature 1..21: note = Synthetic
  source 1..21: mol_type = other RNA
gctcagcctcccaaagtgctg

SEQ ID NO: 7763 - RNA, 21 nt, synthetic construct
  misc_feature 1..21: note = Synthetic
  source 1..21: mol_type = other RNA
gctcaggcctggtctccaact

SEQ ID NO: 7764 - RNA, 21 nt, synthetic construct
  misc_feature 1..21: note = Synthetic
  source 1..21: mol_type = other RNA
gctcaggcgatcctcctgcct

SEQ ID NO: 7765 - RNA, 21 nt, synthetic construct
  misc_feature 1..21: note = Synthetic
  source 1..21: mol_type = other RNA
gctcagggtggtcctctcaca

SEQ ID NO: 7766 - RNA, 21 nt, synthetic construct
  misc_feature 1..21: note = Synthetic
  source 1..21: mol_type = other RNA
gctcatgtccttgcagtcata

SEQ ID NO: 7767 - RNA, 21 nt, synthetic construct
  misc_feature 1..21: note = Synthetic
  source 1..21: mol_type = other RNA
gctccgaaaccagaaaggctt

SEQ ID NO: 7768 - RNA, 21 nt, synthetic construct
  misc_feature 1..21: note = Synthetic
  source 1..21: mol_type = other RNA
gctccgcttcccgggttcaca

SEQ ID NO: 7769 - RNA, 21 nt, synthetic construct
  misc_feature 1..21: note = Synthetic
  source 1..21: mol_type = other RNA
gctccggggacccgggacttg

SEQ ID NO: 7770 - RNA, 21 nt, synthetic construct
  misc_feature 1..21: note = Synthetic
  source 1..21: mol_type = other RNA
gctccggtccagcgtcatctt

SEQ ID NO: 7771 - RNA, 21 nt, synthetic construct
  misc_feature 1..21: note = Synthetic
  source 1..21: mol_type = other RNA
gctccgtggcgatggggagga

SEQ ID NO: 7772 - RNA, 21 nt, synthetic construct
  misc_feature 1..21: note = Synthetic
  source 1..21: mol_type = other RNA
gctcctcatgtccctggccag

SEQ ID NO: 7773 - RNA, 21 nt, synthetic construct
  misc_feature 1..21: note = Synthetic
  source 1..21: mol_type = other RNA
gctcgatcatggctcactgca

SEQ ID NO: 7774 - RNA, 21 nt, synthetic construct
  misc_feature 1..21: note = Synthetic
  source 1..21: mol_type = other RNA
gctcgcagcctctgccaggca

SEQ ID NO: 7775 - RNA, 21 nt, synthetic construct
  misc_feature 1..21: note = Synthetic
  source 1..21: mol_type = other RNA
gctcgtctgagccgttgtcgc

SEQ ID NO: 7776 - RNA, 21 nt, synthetic construct
  misc_feature 1..21: note = Synthetic
  source 1..21: mol_type = other RNA
gctctgcctctgggaagtggc

SEQ ID NO: 7777 - RNA, 21 nt, synthetic construct
  misc_feature 1..21: note = Synthetic
  source 1..21: mol_type = other RNA
gctctggcaggcaatgctttg

SEQ ID NO: 7778 - RNA, 21 nt, synthetic construct
  misc_feature 1..21: note = Synthetic
  source 1..21: mol_type = other RNA
gctctgtcaagctgggtgctg

SEQ ID NO: 7779 - RNA, 21 nt, synthetic construct
  misc_feature 1..21: note = Synthetic
  source 1..21: mol_type = other RNA
gctctgtcacacagctgcccc

SEQ ID NO: 7780 - RNA, 21 nt, synthetic construct
  misc_feature 1..21: note = Synthetic
  source 1..21: mol_type = other RNA
gctctgtcgcccaggccagac

SEQ ID NO: 7781 - RNA, 21 nt, synthetic construct
  misc_feature 1..21: note = Synthetic
  source 1..21: mol_type = other RNA
gctgaagatctcggctgcaga

SEQ ID NO: 7782 - RNA, 21 nt, synthetic construct
  misc_feature 1..21: note = Synthetic
  source 1..21: mol_type = other RNA
gctgaagtccccggatttgca

SEQ ID NO: 7783 - RNA, 21 nt, synthetic construct
  misc_feature 1..21: note = Synthetic
  source 1..21: mol_type = other RNA
gctgacctttagcctgacggt

SEQ ID NO: 7784 - RNA, 21 nt, synthetic construct
  misc_feature 1..21: note = Synthetic
  source 1..21: mol_type = other RNA
gctgatgacggtgtcatagga

SEQ ID NO: 7785 - RNA, 21 nt, synthetic construct
  misc_feature 1..21: note = Synthetic
  source 1..21: mol_type = other RNA
gctgatgcaccatgcatggtt

SEQ ID NO: 7786 - RNA, 21 nt, synthetic construct
  misc_feature 1..21: note = Synthetic
  source 1..21: mol_type = other RNA
gctgatttttaactttttggt

SEQ ID NO: 7787 - RNA, 21 nt, synthetic construct
  misc_feature 1..21: note = Synthetic
  source 1..21: mol_type = other RNA
gctgcagaccaaggaggggcg

SEQ ID NO: 7788 - RNA, 21 nt, synthetic construct
  misc_feature 1..21: note = Synthetic
  source 1..21: mol_type = other RNA
gctgcagatcattctctggga

SEQ ID NO: 7789 - RNA, 21 nt, synthetic construct
  misc_feature 1..21: note = Synthetic
  source 1..21: mol_type = other RNA
gctgcaggtgtcgggatcctg

SEQ ID NO: 7790 - RNA, 21 nt, synthetic construct
  misc_feature 1..21: note = Synthetic
  source 1..21: mol_type = other RNA
gctgccatcgcagacccactt

SEQ ID NO: 7791 - RNA, 21 nt, synthetic construct
  misc_feature 1..21: note = Synthetic
  source 1..21: mol_type = other RNA
gctgccatggatgcagtttcc

SEQ ID NO: 7792 - RNA, 21 nt, synthetic construct
  misc_feature 1..21: note = Synthetic
  source 1..21: mol_type = other RNA
gctgcccccgagaccagagac

SEQ ID NO: 7793 - RNA, 21 nt, synthetic construct
  misc_feature 1..21: note = Synthetic
  source 1..21: mol_type = other RNA
gctgcggccactcatccgagc

SEQ ID NO: 7794 - RNA, 21 nt, synthetic construct
  misc_feature 1..21: note = Synthetic
  source 1..21: mol_type = other RNA
gctgctgatgcaccatgcatg

SEQ ID NO: 7795 - RNA, 21 nt, synthetic construct
  misc_feature 1..21: note = Synthetic
  source 1..21: mol_type = other RNA
gctggaaaccctggcttcccg

SEQ ID NO: 7796 - RNA, 21 nt, synthetic construct
  misc_feature 1..21: note = Synthetic
  source 1..21: mol_type = other RNA
gctggaaagcagtggcataat

SEQ ID NO: 7797 - RNA, 21 nt, synthetic construct
  misc_feature 1..21: note = Synthetic
  source 1..21: mol_type = other RNA
gctggaagccgtcggggcaca

SEQ ID NO: 7798 - RNA, 21 nt, synthetic construct
  misc_feature 1..21: note = Synthetic
  source 1..21: mol_type = other RNA
gctggaagccttcctcacact

SEQ ID NO: 7799 - RNA, 21 nt, synthetic construct
  misc_feature 1..21: note = Synthetic
  source 1..21: mol_type = other RNA
gctggagtgcagtggctcgat

SEQ ID NO: 7800 - RNA, 21 nt, synthetic construct
  misc_feature 1..21: note = Synthetic
  source 1..21: mol_type = other RNA
gctggagtggatgcactcgcc

SEQ ID NO: 7801 - RNA, 21 nt, synthetic construct
  misc_feature 1..21: note = Synthetic
  source 1..21: mol_type = other RNA
gctggccacctccgtgtccag

SEQ ID NO: 7802 - RNA, 21 nt, synthetic construct
  misc_feature 1..21: note = Synthetic
  source 1..21: mol_type = other RNA
gctggcgggaccacaggtgag

SEQ ID NO: 7803 - RNA, 21 nt, synthetic construct
  misc_feature 1..21: note = Synthetic
  source 1..21: mol_type = other RNA
gctggctgcaggtgtcgggat

SEQ ID NO: 7804 - RNA, 21 nt, synthetic construct
  misc_feature 1..21: note = Synthetic
  source 1..21: mol_type = other RNA
gctgggactacaggtgcccgc

SEQ ID NO: 7805 - RNA, 21 nt, synthetic construct
  misc_feature 1..21: note = Synthetic
  source 1..21: mol_type = other RNA
gctgggatcacaggcacgtgc

SEQ ID NO: 7806 - RNA, 21 nt, synthetic construct
  misc_feature 1..21: note = Synthetic
  source 1..21: mol_type = other RNA
gctgggattacaggcgtgagc

SEQ ID NO: 7807 - RNA, 21 nt, synthetic construct
  misc_feature 1..21: note = Synthetic
  source 1..21: mol_type = other RNA
gctgggattacaggcgtgagg

SEQ ID NO: 7808 - RNA, 21 nt, synthetic construct
  misc_feature 1..21: note = Synthetic
  source 1..21: mol_type = other RNA
gctgggccaccagctggaagc

SEQ ID NO: 7809 - RNA, 21 nt, synthetic construct
  misc_feature 1..21: note = Synthetic
  source 1..21: mol_type = other RNA
gctgggggatgcaggtggagc

SEQ ID NO: 7810 - RNA, 21 nt, synthetic construct
  misc_feature 1..21: note = Synthetic
  source 1..21: mol_type = other RNA
gctgggtgaggttgtggaaga

SEQ ID NO: 7811 - RNA, 21 nt, synthetic construct
  misc_feature 1..21: note = Synthetic
  source 1..21: mol_type = other RNA
gctgggtgctgcagatcattc

SEQ ID NO: 7812 - RNA, 21 nt, synthetic construct
  misc_feature 1..21: note = Synthetic
  source 1..21: mol_type = other RNA
gctggtggggcgagggcgccc

SEQ ID NO: 7813 - RNA, 21 nt, synthetic construct
  misc_feature 1..21: note = Synthetic
  source 1..21: mol_type = other RNA
gctggtgtactcgctccggtc

SEQ ID NO: 7814 - RNA, 21 nt, synthetic construct
  misc_feature 1..21: note = Synthetic
  source 1..21: mol_type = other RNA
gctggtgtcctgacagccaca

SEQ ID NO: 7815 - RNA, 21 nt, synthetic construct
  misc_feature 1..21: note = Synthetic
  source 1..21: mol_type = other RNA
gctgtagccgtcctggttgtg

SEQ ID NO: 7816 - RNA, 21 nt, synthetic construct
  misc_feature 1..21: note = Synthetic
  source 1..21: mol_type = other RNA
gctgtcactgtctctccggac

SEQ ID NO: 7817 - RNA, 21 nt, synthetic construct
  misc_feature 1..21: note = Synthetic
  source 1..21: mol_type = other RNA
gctgtctagcaaggcttgcat

SEQ ID NO: 7818 - RNA, 21 nt, synthetic construct
  misc_feature 1..21: note = Synthetic
  source 1..21: mol_type = other RNA
gctgtgacacttgaacttgtt

SEQ ID NO: 7819 - RNA, 21 nt, synthetic construct
  misc_feature 1..21: note = Synthetic
  source 1..21: mol_type = other RNA
gctgtggagctgacctttagc

SEQ ID NO: 7820 - RNA, 21 nt, synthetic construct
  misc_feature 1..21: note = Synthetic
  source 1..21: mol_type = other RNA
gctgtggatccagtccacagc

SEQ ID NO: 7821 - RNA, 21 nt, synthetic construct
  misc_feature 1..21: note = Synthetic
  source 1..21: mol_type = other RNA
gctgtgtcctagctggaaacc

SEQ ID NO: 7822 - RNA, 21 nt, synthetic construct
  misc_feature 1..21: note = Synthetic
  source 1..21: mol_type = other RNA
gctgtgtccttacggctgtgg

SEQ ID NO: 7823 - RNA, 21 nt, synthetic construct
  misc_feature 1..21: note = Synthetic
  source 1..21: mol_type = other RNA
gctgttgatgttcttaagccg

SEQ ID NO: 7824 - RNA, 21 nt, synthetic construct
  misc_feature 1..21: note = Synthetic
  source 1..21: mol_type = other RNA
gctgttgcactggaagctggc

SEQ ID NO: 7825 - RNA, 21 nt, synthetic construct
  misc_feature 1..21: note = Synthetic
  source 1..21: mol_type = other RNA
gctgttgtgtgttgaaagcca

SEQ ID NO: 7826 - RNA, 21 nt, synthetic construct
  misc_feature 1..21: note = Synthetic
  source 1..21: mol_type = other RNA
gcttaaggaaggtacaaaccc

SEQ ID NO: 7827 - RNA, 21 nt, synthetic construct
  misc_feature 1..21: note = Synthetic
  source 1..21: mol_type = other RNA
gcttagagattggtggatgag

SEQ ID NO: 7828 - RNA, 21 nt, synthetic construct
  misc_feature 1..21: note = Synthetic
  source 1..21: mol_type = other RNA
gcttatcacggttccctgcac

SEQ ID NO: 7829 - RNA, 21 nt, synthetic construct
  misc_feature 1..21: note = Synthetic
  source 1..21: mol_type = other RNA
gcttcccgggttcacaccatt

SEQ ID NO: 7830 - RNA, 21 nt, synthetic construct
  misc_feature 1..21: note = Synthetic
  source 1..21: mol_type = other RNA
gcttcgttgatgatatctgtc

SEQ ID NO: 7831 - RNA, 21 nt, synthetic construct
  misc_feature 1..21: note = Synthetic
  source 1..21: mol_type = other RNA
gcttctctgggcctgacatcc

SEQ ID NO: 7832 - RNA, 21 nt, synthetic construct
  misc_feature 1..21: note = Synthetic
  source 1..21: mol_type = other RNA
gcttcttctcatttcctctgc

SEQ ID NO: 7833 - RNA, 21 nt, synthetic construct
  misc_feature 1..21: note = Synthetic
  source 1..21: mol_type = other RNA
gcttgagatggagtgaagttt

SEQ ID NO: 7834 - RNA, 21 nt, synthetic construct
  misc_feature 1..21: note = Synthetic
  source 1..21: mol_type = other RNA
gcttgcatagaagaggtaaac

SEQ ID NO: 7835 - RNA, 21 nt, synthetic construct
  misc_feature 1..21: note = Synthetic
  source 1..21: mol_type = other RNA
gcttggagccgttctccctga

SEQ ID NO: 7836 - RNA, 21 nt, synthetic construct
  misc_feature 1..21: note = Synthetic
  source 1..21: mol_type = other RNA
gcttggaggcatttgcataga

SEQ ID NO: 7837 - RNA, 21 nt, synthetic construct
  misc_feature 1..21: note = Synthetic
  source 1..21: mol_type = other RNA
gcttggtgagacattgtcact

SEQ ID NO: 7838 - RNA, 21 nt, synthetic construct
  misc_feature 1..21: note = Synthetic
  source 1..21: mol_type = other RNA
gctttccctggcctgggatcc

SEQ ID NO: 7839 - RNA, 21 nt, synthetic construct
  misc_feature 1..21: note = Synthetic
  source 1..21: mol_type = other RNA
gctttgaagtcccggtcaacc

SEQ ID NO: 7840 - RNA, 21 nt, synthetic construct
  misc_feature 1..21: note = Synthetic
  source 1..21: mol_type = other RNA
gctttggtcttctctgtcttt

SEQ ID NO: 7841 - RNA, 21 nt, synthetic construct
  misc_feature 1..21: note = Synthetic
  source 1..21: mol_type = other RNA
gctttgttgctcaggcctggt

SEQ ID NO: 7842 - RNA, 21 nt, synthetic construct
  misc_feature 1..21: note = Synthetic
  source 1..21: mol_type = other RNA
ggaaaccctggcttcccgcga

SEQ ID NO: 7843 - RNA, 21 nt, synthetic construct
  misc_feature 1..21: note = Synthetic
  source 1..21: mol_type = other RNA
ggaaaccggggacttcgccag

SEQ ID NO: 7844 - RNA, 21 nt, synthetic construct
  misc_feature 1..21: note = Synthetic
  source 1..21: mol_type = other RNA
ggaaagcagtggcataatcat

SEQ ID NO: 7845 - RNA, 21 nt, synthetic construct
  misc_feature 1..21: note = Synthetic
  source 1..21: mol_type = other RNA
ggaaaggaagaaaccaaaatc

SEQ ID NO: 7846 - RNA, 21 nt, synthetic construct
  misc_feature 1..21: note = Synthetic
  source 1..21: mol_type = other RNA
ggaacacgtaaagacccctac

SEQ ID NO: 7847 - RNA, 21 nt, synthetic construct
  misc_feature 1..21: note = Synthetic
  source 1..21: mol_type = other RNA
ggaacagccgccgttgttgtc

SEQ ID NO: 7848 - RNA, 21 nt, synthetic construct
  misc_feature 1..21: note = Synthetic
  source 1..21: mol_type = other RNA
ggaacaggtcgggtggttgtg

SEQ ID NO: 7849 - RNA, 21 nt, synthetic construct
  misc_feature 1..21: note = Synthetic
  source 1..21: mol_type = other RNA
ggaaccgaggccttgagggtg

SEQ ID NO: 7850 - RNA, 21 nt, synthetic construct
  misc_feature 1..21: note = Synthetic
  source 1..21: mol_type = other RNA
ggaaccgcggaggaacgccag

SEQ ID NO: 7851 - RNA, 21 nt, synthetic construct
  misc_feature 1..21: note = Synthetic
  source 1..21: mol_type = other RNA
ggaacctgtgaggcggttggc

SEQ ID NO: 7852 - RNA, 21 nt, synthetic construct
  misc_feature 1..21: note = Synthetic
  source 1..21: mol_type = other RNA
ggaactcgaaggccgagcagg

SEQ ID NO: 7853 - RNA, 21 nt, synthetic construct
  misc_feature 1..21: note = Synthetic
  source 1..21: mol_type = other RNA
ggaactcgtttctttcgcatc

SEQ ID NO: 7854 - RNA, 21 nt, synthetic construct
  misc_feature 1..21: note = Synthetic
  source 1..21: mol_type = other RNA
ggaagaaaccaaaatcccaac

SEQ ID NO: 7855 - RNA, 21 nt, synthetic construct
  misc_feature 1..21: note = Synthetic
  source 1..21: mol_type = other RNA
ggaagacccccaggcaaagga

SEQ ID NO: 7856 - RNA, 21 nt, synthetic construct
  misc_feature 1..21: note = Synthetic
  source 1..21: mol_type = other RNA
ggaagacgaggagcacgatgg

SEQ ID NO: 7857 - RNA, 21 nt, synthetic construct
  misc_feature 1..21: note = Synthetic
  source 1..21: mol_type = other RNA
ggaagacgaggagcactgtag

SEQ ID NO: 7858 - RNA, 21 nt, synthetic construct
  misc_feature 1..21: note = Synthetic
  source 1..21: mol_type = other RNA
ggaagagaaccatatcctctg

SEQ ID NO: 7859 - RNA, 21 nt, synthetic construct
  misc_feature 1..21: note = Synthetic
  source 1..21: mol_type = other RNA
ggaagagacgccgtgggctct

SEQ ID NO: 7860 - RNA, 21 nt, synthetic construct
  misc_feature 1..21: note = Synthetic
  source 1..21: mol_type = other RNA
ggaagcactaggtgggcggac

SEQ ID NO: 7861 - RNA, 21 nt, synthetic construct
  misc_feature 1..21: note = Synthetic
  source 1..21: mol_type = other RNA
ggaagccgtcggggcacaggc

SEQ ID NO: 7862 - RNA, 21 nt, synthetic construct
  misc_feature 1..21: note = Synthetic
  source 1..21: mol_type = other RNA
ggaagccttcctcacactggc

SEQ ID NO: 7863 - RNA, 21 nt, synthetic construct
  misc_feature 1..21: note = Synthetic
  source 1..21: mol_type = other RNA
ggaagctggcgggaccacagg

SEQ ID NO: 7864 - RNA, 21 nt, synthetic construct
  misc_feature 1..21: note = Synthetic
  source 1..21: mol_type = other RNA
ggaagggttctgggcagggac

SEQ ID NO: 7865 - RNA, 21 nt, synthetic construct
  misc_feature 1..21: note = Synthetic
  source 1..21: mol_type = other RNA
ggaaggtacaaacccacctcg

SEQ ID NO: 7866 - RNA, 21 nt, synthetic construct
  misc_feature 1..21: note = Synthetic
  source 1..21: mol_type = other RNA
ggaagtgaatggcttggaggc

SEQ ID NO: 7867 - RNA, 21 nt, synthetic construct
  misc_feature 1..21: note = Synthetic
  source 1..21: mol_type = other RNA
ggaagtggcatcatttggtga

SEQ ID NO: 7868 - RNA, 21 nt, synthetic construct
  misc_feature 1..21: note = Synthetic
  source 1..21: mol_type = other RNA
ggaagtgggtaggggtcggga

SEQ ID NO: 7869 - RNA, 21 nt, synthetic construct
  misc_feature 1..21: note = Synthetic
  source 1..21: mol_type = other RNA
ggaatgcagcggttgacacgg

SEQ ID NO: 7870 - RNA, 21 nt, synthetic construct
  misc_feature 1..21: note = Synthetic
  source 1..21: mol_type = other RNA
ggaatggaagtgggtaggggt

SEQ ID NO: 7871 - RNA, 21 nt, synthetic construct
  misc_feature 1..21: note = Synthetic
  source 1..21: mol_type = other RNA
ggaattcgtcagggcgacagg

SEQ ID NO: 7872 - RNA, 21 nt, synthetic construct
  misc_feature 1..21: note = Synthetic
  source 1..21: mol_type = other RNA
ggacaaggtggggacggaggt

SEQ ID NO: 7873 - RNA, 21 nt, synthetic construct
  misc_feature 1..21: note = Synthetic
  source 1..21: mol_type = other RNA
ggacaatggacagagccctca

SEQ ID NO: 7874 - RNA, 21 nt, synthetic construct
  misc_feature 1..21: note = Synthetic
  source 1..21: mol_type = other RNA
ggacaattgccaatcccttgt

SEQ ID NO: 7875 - RNA, 21 nt, synthetic construct
  misc_feature 1..21: note = Synthetic
  source 1..21: mol_type = other RNA
ggacacagtgttttgtccctg

SEQ ID NO: 7876 - RNA, 21 nt, synthetic construct
  misc_feature 1..21: note = Synthetic
  source 1..21: mol_type = other RNA
ggacagagccctcacgctact

SEQ ID NO: 7877 - RNA, 21 nt, synthetic construct
  misc_feature 1..21: note = Synthetic
  source 1..21: mol_type = other RNA
ggacagagtcggtccagtaga

SEQ ID NO: 7878 - RNA, 21 nt, synthetic construct
  misc_feature 1..21: note = Synthetic
  source 1..21: mol_type = other RNA
ggacagccttgctcgtctgag

SEQ ID NO: 7879 - RNA, 21 nt, synthetic construct
  misc_feature 1..21: note = Synthetic
  source 1..21: mol_type = other RNA
ggacaggtcagaccagtagat

SEQ ID NO: 7880 - RNA, 21 nt, synthetic construct
  misc_feature 1..21: note = Synthetic
  source 1..21: mol_type = other RNA
ggacagtaggttttcagccaa

SEQ ID NO: 7881 - RNA, 21 nt, synthetic construct
  misc_feature 1..21: note = Synthetic
  source 1..21: mol_type = other RNA
ggacataaagacgacaatggc

SEQ ID NO: 7882 - RNA, 21 nt, synthetic construct
  misc_feature 1..21: note = Synthetic
  source 1..21: mol_type = other RNA
ggacatcagtgcaacagtaac

SEQ ID NO: 7883 - RNA, 21 nt, synthetic construct
  misc_feature 1..21: note = Synthetic
  source 1..21: mol_type = other RNA
ggacatcattctcccaaaaag

SEQ ID NO: 7884 - RNA, 21 nt, synthetic construct
  misc_feature 1..21: note = Synthetic
  source 1..21: mol_type = other RNA
ggaccacaggtgagcaccggg

SEQ ID NO: 7885 - RNA, 21 nt, synthetic construct
  misc_feature 1..21: note = Synthetic
  source 1..21: mol_type = other RNA
ggacccgggacttgtcgtcgc

SEQ ID NO: 7886 - RNA, 21 nt, synthetic construct
  misc_feature 1..21: note = Synthetic
  source 1..21: mol_type = other RNA
ggacctcatcctctgtggtct

SEQ ID NO: 7887 - RNA, 21 nt, synthetic construct
  misc_feature 1..21: note = Synthetic
  source 1..21: mol_type = other RNA
ggacgcatttacgtgctccga

SEQ ID NO: 7888 - RNA, 21 nt, synthetic construct
  misc_feature 1..21: note = Synthetic
  source 1..21: mol_type = other RNA
ggacggaggtgtcgccacaga

SEQ ID NO: 7889 - RNA, 21 nt, synthetic construct
  misc_feature 1..21: note = Synthetic
  source 1..21: mol_type = other RNA
ggacgggactccaggcagatg

SEQ ID NO: 7890 - RNA, 21 nt, synthetic construct
  misc_feature 1..21: note = Synthetic
  source 1..21: mol_type = other RNA
ggactacaggtgcccgccacc

SEQ ID NO: 7891 - RNA, 21 nt, synthetic construct
  misc_feature 1..21: note = Synthetic
  source 1..21: mol_type = other RNA
ggactcatcagagccatcctg

SEQ ID NO: 7892 - RNA, 21 nt, synthetic construct
  misc_feature 1..21: note = Synthetic
  source 1..21: mol_type = other RNA
ggactccaggcagatgttcac

SEQ ID NO: 7893 - RNA, 21 nt, synthetic construct
  misc_feature 1..21: note = Synthetic
  source 1..21: mol_type = other RNA
ggactgcagtggcgcaatctc

SEQ ID NO: 7894 - RNA, 21 nt, synthetic construct
  misc_feature 1..21: note = Synthetic
  source 1..21: mol_type = other RNA
ggacttcgccaggagggccca

SEQ ID NO: 7895 - RNA, 21 nt, synthetic construct
  misc_feature 1..21: note = Synthetic
  source 1..21: mol_type = other RNA
ggacttgtcgtcgcctttgtg

SEQ ID NO: 7896 - RNA, 21 nt, synthetic construct
  misc_feature 1..21: note = Synthetic
  source 1..21: mol_type = other RNA
ggagaaggggtgggccagcct

SEQ ID NO: 7897 - RNA, 21 nt, synthetic construct
  misc_feature 1..21: note = Synthetic
  source 1..21: mol_type = other RNA
ggagaccacgggaatggaagt

SEQ ID NO: 7898 - RNA, 21 nt, synthetic construct
  misc_feature 1..21: note = Synthetic
  source 1..21: mol_type = other RNA
ggagagaaactcaaaacttcc

SEQ ID NO: 7899 - RNA, 21 nt, synthetic construct
  misc_feature 1..21: note = Synthetic
  source 1..21: mol_type = other RNA
ggagagaaatggaggtgtcat

SEQ ID NO: 7900 - RNA, 21 nt, synthetic construct
  misc_feature 1..21: note = Synthetic
  source 1..21: mol_type = other RNA
ggagaggcacgctctgtcaca

SEQ ID NO: 7901 - RNA, 21 nt, synthetic construct
  misc_feature 1..21: note = Synthetic
  source 1..21: mol_type = other RNA
ggagatctagggtgatgccat

SEQ ID NO: 7902 - RNA, 21 nt, synthetic construct
  misc_feature 1..21: note = Synthetic
  source 1..21: mol_type = other RNA
ggagatgcatttcccgtcttg

SEQ ID NO: 7903 - RNA, 21 nt, synthetic construct
  misc_feature 1..21: note = Synthetic
  source 1..21: mol_type = other RNA
ggagattctgaggcaacgttt

SEQ ID NO: 7904 - RNA, 21 nt, synthetic construct
  misc_feature 1..21: note = Synthetic
  source 1..21: mol_type = other RNA
ggagcaaggcgacggtccagc

SEQ ID NO: 7905 - RNA, 21 nt, synthetic construct
  misc_feature 1..21: note = Synthetic
  source 1..21: mol_type = other RNA
ggagcacgatggggaggacaa

SEQ ID NO: 7906 - RNA, 21 nt, synthetic construct
  misc_feature 1..21: note = Synthetic
  source 1..21: mol_type = other RNA
ggagcacgtctcctgggactc

SEQ ID NO: 7907 - RNA, 21 nt, synthetic construct
  misc_feature 1..21: note = Synthetic
  source 1..21: mol_type = other RNA
ggagcacgtcttgggggagca

SEQ ID NO: 7908 - RNA, 21 nt, synthetic construct
  misc_feature 1..21: note = Synthetic
  source 1..21: mol_type = other RNA
ggagcacgtcttggggggaca

SEQ ID NO: 7909 - RNA, 21 nt, synthetic construct
  misc_feature 1..21: note = Synthetic
  source 1..21: mol_type = other RNA
ggagcactgtagggagaggca

SEQ ID NO: 7910 - RNA, 21 nt, synthetic construct
  misc_feature 1..21: note = Synthetic
  source 1..21: mol_type = other RNA
ggagcccacagccttgcaggc

SEQ ID NO: 7911 - RNA, 21 nt, synthetic construct
  misc_feature 1..21: note = Synthetic
  source 1..21: mol_type = other RNA
ggagccgttctccctgaataa

SEQ ID NO: 7912 - RNA, 21 nt, synthetic construct
  misc_feature 1..21: note = Synthetic
  source 1..21: mol_type = other RNA
ggagctgacctttagcctgac

SEQ ID NO: 7913 - RNA, 21 nt, synthetic construct
  misc_feature 1..21: note = Synthetic
  source 1..21: mol_type = other RNA
ggagctgttgcactggaagct

SEQ ID NO: 7914 - RNA, 21 nt, synthetic construct
  misc_feature 1..21: note = Synthetic
  source 1..21: mol_type = other RNA
ggaggaacgccaggcctcccc

SEQ ID NO: 7915 - RNA, 21 nt, synthetic construct
  misc_feature 1..21: note = Synthetic
  source 1..21: mol_type = other RNA
ggaggacaatggacagagccc

SEQ ID NO: 7916 - RNA, 21 nt, synthetic construct
  misc_feature 1..21: note = Synthetic
  source 1..21: mol_type = other RNA
ggaggatgggcaccaggctgg

SEQ ID NO: 7917 - RNA, 21 nt, synthetic construct
  misc_feature 1..21: note = Synthetic
  source 1..21: mol_type = other RNA
ggaggatttatttattttttt

SEQ ID NO: 7918 - RNA, 21 nt, synthetic construct
  misc_feature 1..21: note = Synthetic
  source 1..21: mol_type = other RNA
ggaggcacagatactggcagc

SEQ ID NO: 7919 - RNA, 21 nt, synthetic construct
  misc_feature 1..21: note = Synthetic
  source 1..21: mol_type = other RNA
ggaggcatttgcatagaagtg

SEQ ID NO: 7920 - RNA, 21 nt, synthetic construct
  misc_feature 1..21: note = Synthetic
  source 1..21: mol_type = other RNA
ggaggcctcgtctgagccgtc

SEQ ID NO: 7921 - RNA, 21 nt, synthetic construct
  misc_feature 1..21: note = Synthetic
  source 1..21: mol_type = other RNA
ggaggcggctccggggacccg

SEQ ID NO: 7922 - RNA, 21 nt, synthetic construct
  misc_feature 1..21: note = Synthetic
  source 1..21: mol_type = other RNA
ggaggctgtcactgtctctcc

SEQ ID NO: 7923 - RNA, 21 nt, synthetic construct
  misc_feature 1..21: note = Synthetic
  source 1..21: mol_type = other RNA
ggagggcccaggataacggag

SEQ ID NO: 7924 - RNA, 21 nt, synthetic construct
  misc_feature 1..21: note = Synthetic
  source 1..21: mol_type = other RNA
ggagggcgactcgtgtatgtc

SEQ ID NO: 7925 - RNA, 21 nt, synthetic construct
  misc_feature 1..21: note = Synthetic
  source 1..21: mol_type = other RNA
ggaggggcggggagattctga

SEQ ID NO: 7926 - RNA, 21 nt, synthetic construct
  misc_feature 1..21: note = Synthetic
  source 1..21: mol_type = other RNA
ggaggtgtcatcctggtcccc

SEQ ID NO: 7927 - RNA, 21 nt, synthetic construct
  misc_feature 1..21: note = Synthetic
  source 1..21: mol_type = other RNA
ggaggtgtcgccacagagcac

SEQ ID NO: 7928 - RNA, 21 nt, synthetic construct
  misc_feature 1..21: note = Synthetic
  source 1..21: mol_type = other RNA
ggaggtgtcgggaacaggtcg

SEQ ID NO: 7929 - RNA, 21 nt, synthetic construct
  misc_feature 1..21: note = Synthetic
  source 1..21: mol_type = other RNA
ggagtcaacccagtagaggcg

SEQ ID NO: 7930 - RNA, 21 nt, synthetic construct
  misc_feature 1..21: note = Synthetic
  source 1..21: mol_type = other RNA
ggagtctcgctctgtcgccca

SEQ ID NO: 7931 - RNA, 21 nt, synthetic construct
  misc_feature 1..21: note = Synthetic
  source 1..21: mol_type = other RNA
ggagtctgacggaggctgtca

SEQ ID NO: 7932 - RNA, 21 nt, synthetic construct
  misc_feature 1..21: note = Synthetic
  source 1..21: mol_type = other RNA
ggagtgaagtttggagtcaac

SEQ ID NO: 7933 - RNA, 21 nt, synthetic construct
  misc_feature 1..21: note = Synthetic
  source 1..21: mol_type = other RNA
ggagtgcagtggctcgatcat

SEQ ID NO: 7934 - RNA, 21 nt, synthetic construct
  misc_feature 1..21: note = Synthetic
  source 1..21: mol_type = other RNA
ggagtggatgcactcgccact

SEQ ID NO: 7935 - RNA, 21 nt, synthetic construct
  misc_feature 1..21: note = Synthetic
  source 1..21: mol_type = other RNA
ggagttccccagtcagtccag

SEQ ID NO: 7936 - RNA, 21 nt, synthetic construct
  misc_feature 1..21: note = Synthetic
  source 1..21: mol_type = other RNA
ggataacggagggcgactcgt

SEQ ID NO: 7937 - RNA, 21 nt, synthetic construct
  misc_feature 1..21: note = Synthetic
  source 1..21: mol_type = other RNA
ggatcacaggcacgtgccacc

SEQ ID NO: 7938 - RNA, 21 nt, synthetic construct
  misc_feature 1..21: note = Synthetic
  source 1..21: mol_type = other RNA
ggatcacgacctgctgtgtcc

SEQ ID NO: 7939 - RNA, 21 nt, synthetic construct
  misc_feature 1..21: note = Synthetic
  source 1..21: mol_type = other RNA
ggatccaccacgatggccctt

SEQ ID NO: 7940 - RNA, 21 nt, synthetic construct
  misc_feature 1..21: note = Synthetic
  source 1..21: mol_type = other RNA
ggatccagtccacagccagcc

SEQ ID NO: 7941 - RNA, 21 nt, synthetic construct
  misc_feature 1..21: note = Synthetic
  source 1..21: mol_type = other RNA
ggatcccatcccaacacacac

SEQ ID NO: 7942 - RNA, 21 nt, synthetic construct
  misc_feature 1..21: note = Synthetic
  source 1..21: mol_type = other RNA
ggatcctgacactcatcgata

SEQ ID NO: 7943 - RNA, 21 nt, synthetic construct
  misc_feature 1..21: note = Synthetic
  source 1..21: mol_type = other RNA
ggatctcgctttgttgctcag

SEQ ID NO: 7944 - RNA, 21 nt, synthetic construct
  misc_feature 1..21: note = Synthetic
  source 1..21: mol_type = other RNA
ggatgaggcagggccaggggg

SEQ ID NO: 7945 - RNA, 21 nt, synthetic construct
  misc_feature 1..21: note = Synthetic
  source 1..21: mol_type = other RNA
ggatgaggctggtgtactcgc

SEQ ID NO: 7946 - RNA, 21 nt, synthetic construct
  misc_feature 1..21: note = Synthetic
  source 1..21: mol_type = other RNA
ggatgcactcgccacttaggc

SEQ ID NO: 7947 - RNA, 21 nt, synthetic construct
  misc_feature 1..21: note = Synthetic
  source 1..21: mol_type = other RNA
ggatgcaggtggagctgttgc

SEQ ID NO: 7948 - RNA, 21 nt, synthetic construct
  misc_feature 1..21: note = Synthetic
  source 1..21: mol_type = other RNA
ggatgcagtttccatcagagc

SEQ ID NO: 7949 - RNA, 21 nt, synthetic construct
  misc_feature 1..21: note = Synthetic
  source 1..21: mol_type = other RNA
ggatgggcaccaggctggtgt

SEQ ID NO: 7950 - RNA, 21 nt, synthetic construct
  misc_feature 1..21: note = Synthetic
  source 1..21: mol_type = other RNA
ggatggtctcgatctcctgac

SEQ ID NO: 7951 - RNA, 21 nt, synthetic construct
  misc_feature 1..21: note = Synthetic
  source 1..21: mol_type = other RNA
ggatgtctcctgggtggccac

SEQ ID NO: 7952 - RNA, 21 nt, synthetic construct
  misc_feature 1..21: note = Synthetic
  source 1..21: mol_type = other RNA
ggatgtctctgctgatgacgg

SEQ ID NO: 7953 - RNA, 21 nt, synthetic construct
  misc_feature 1..21: note = Synthetic
  source 1..21: mol_type = other RNA
ggattacaggcgtgagccact

SEQ ID NO: 7954 - RNA, 21 nt, synthetic construct
  misc_feature 1..21: note = Synthetic
  source 1..21: mol_type = other RNA
ggattacaggcgtgaggcacc

SEQ ID NO: 7955 - RNA, 21 nt, synthetic construct
  misc_feature 1..21: note = Synthetic
  source 1..21: mol_type = other RNA
ggattcagccagatcatttcc

SEQ ID NO: 7956 - RNA, 21 nt, synthetic construct
  misc_feature 1..21: note = Synthetic
  source 1..21: mol_type = other RNA
ggattgtgtcacggtggagag

SEQ ID NO: 7957 - RNA, 21 nt, synthetic construct
  misc_feature 1..21: note = Synthetic
  source 1..21: mol_type = other RNA
ggatttatttatttttttata

SEQ ID NO: 7958 - RNA, 21 nt, synthetic construct
  misc_feature 1..21: note = Synthetic
  source 1..21: mol_type = other RNA
ggatttgcaggtgacagacaa

SEQ ID NO: 7959 - RNA, 21 nt, synthetic construct
  misc_feature 1..21: note = Synthetic
  source 1..21: mol_type = other RNA
ggcaaaggaagacgaggagca

SEQ ID NO: 7960 - RNA, 21 nt, synthetic construct
  misc_feature 1..21: note = Synthetic
  source 1..21: mol_type = other RNA
ggcaaaggctaacctggctgt

SEQ ID NO: 7961 - RNA, 21 nt, synthetic construct
  misc_feature 1..21: note = Synthetic
  source 1..21: mol_type = other RNA
ggcaaatgtggacctcatcct

SEQ ID NO: 7962 - RNA, 21 nt, synthetic construct
  misc_feature 1..21: note = Synthetic
  source 1..21: mol_type = other RNA
ggcaacgtttcaacctcgtaa

SEQ ID NO: 7963 - RNA, 21 nt, synthetic construct
  misc_feature 1..21: note = Synthetic
  source 1..21: mol_type = other RNA
ggcaataaccccctacacagg

SEQ ID NO: 7964 - RNA, 21 nt, synthetic construct
  misc_feature 1..21: note = Synthetic
  source 1..21: mol_type = other RNA
ggcaatgctttggtcttctct

SEQ ID NO: 7965 - RNA, 21 nt, synthetic construct
  misc_feature 1..21: note = Synthetic
  source 1..21: mol_type = other RNA
ggcacagatactggcagccgc

SEQ ID NO: 7966 - RNA, 21 nt, synthetic construct
  misc_feature 1..21: note = Synthetic
  source 1..21: mol_type = other RNA
ggcacaggcactcgtagccga

SEQ ID NO: 7967 - RNA, 21 nt, synthetic construct
  misc_feature 1..21: note = Synthetic
  source 1..21: mol_type = other RNA
ggcaccaggctggtgtcctga

SEQ ID NO: 7968 - RNA, 21 nt, synthetic construct
  misc_feature 1..21: note = Synthetic
  source 1..21: mol_type = other RNA
ggcacctgtgtctggccaaat

SEQ ID NO: 7969 - RNA, 21 nt, synthetic construct
  misc_feature 1..21: note = Synthetic
  source 1..21: mol_type = other RNA
ggcacgctctgtcacacagct

SEQ ID NO: 7970 - RNA, 21 nt, synthetic construct
  misc_feature 1..21: note = Synthetic
  source 1..21: mol_type = other RNA
ggcacgtgccaccgtacccag

SEQ ID NO: 7971 - RNA, 21 nt, synthetic construct
  misc_feature 1..21: note = Synthetic
  source 1..21: mol_type = other RNA
ggcactcagcgctgccatcgc

SEQ ID NO: 7972 - RNA, 21 nt, synthetic construct
  misc_feature 1..21: note = Synthetic
  source 1..21: mol_type = other RNA
ggcactcgtagccgatcttaa

SEQ ID NO: 7973 - RNA, 21 nt, synthetic construct
  misc_feature 1..21: note = Synthetic
  source 1..21: mol_type = other RNA
ggcactgaaaatggcttcgtt

SEQ ID NO: 7974 - RNA, 21 nt, synthetic construct
  misc_feature 1..21: note = Synthetic
  source 1..21: mol_type = other RNA
ggcactggaactcgtttcttt

SEQ ID NO: 7975 - RNA, 21 nt, synthetic construct
  misc_feature 1..21: note = Synthetic
  source 1..21: mol_type = other RNA
ggcactgtccgaagcctgttc

SEQ ID NO: 7976 - RNA, 21 nt, synthetic construct
  misc_feature 1..21: note = Synthetic
  source 1..21: mol_type = other RNA
ggcacttaataaatattaagg

SEQ ID NO: 7977 - RNA, 21 nt, synthetic construct
  misc_feature 1..21: note = Synthetic
  source 1..21: mol_type = other RNA
ggcacttgtagccaccctcca

SEQ ID NO: 7978 - RNA, 21 nt, synthetic construct
  misc_feature 1..21: note = Synthetic
  source 1..21: mol_type = other RNA
ggcagatgttcacgccacgtc

SEQ ID NO: 7979 - RNA, 21 nt, synthetic construct
  misc_feature 1..21: note = Synthetic
  source 1..21: mol_type = other RNA
ggcagccgccattgctcaggg

SEQ ID NO: 7980 - RNA, 21 nt, synthetic construct
  misc_feature 1..21: note = Synthetic
  source 1..21: mol_type = other RNA
ggcagccgggaggtgtcggga

SEQ ID NO: 7981 - RNA, 21 nt, synthetic construct
  misc_feature 1..21: note = Synthetic
  source 1..21: mol_type = other RNA
ggcagcgaaactcgtcctggg

SEQ ID NO: 7982 - RNA, 21 nt, synthetic construct
  misc_feature 1..21: note = Synthetic
  source 1..21: mol_type = other RNA
ggcagctcctcatgtccctgg

SEQ ID NO: 7983 - RNA, 21 nt, synthetic construct
  misc_feature 1..21: note = Synthetic
  source 1..21: mol_type = other RNA
ggcaggaggcctcgtctgagc

SEQ ID NO: 7984 - RNA, 21 nt, synthetic construct
  misc_feature 1..21: note = Synthetic
  source 1..21: mol_type = other RNA
ggcaggcaatgctttggtctt

SEQ ID NO: 7985 - RNA, 21 nt, synthetic construct
  misc_feature 1..21: note = Synthetic
  source 1..21: mol_type = other RNA
ggcaggcgcaggtaaacttgg

SEQ ID NO: 7986 - RNA, 21 nt, synthetic construct
  misc_feature 1..21: note = Synthetic
  source 1..21: mol_type = other RNA
ggcagggacgggactccaggc

SEQ ID NO: 7987 - RNA, 21 nt, synthetic construct
  misc_feature 1..21: note = Synthetic
  source 1..21: mol_type = other RNA
ggcagggaggcacagatactg

SEQ ID NO: 7988 - RNA, 21 nt, synthetic construct
  misc_feature 1..21: note = Synthetic
  source 1..21: mol_type = other RNA
ggcagggccagggggtcccgt

SEQ ID NO: 7989 - RNA, 21 nt, synthetic construct
  misc_feature 1..21: note = Synthetic
  source 1..21: mol_type = other RNA
ggcagtctctagccatgttgc

SEQ ID NO: 7990 - RNA, 21 nt, synthetic construct
  misc_feature 1..21: note = Synthetic
  source 1..21: mol_type = other RNA
ggcagtggaactcgaaggccg

SEQ ID NO: 7991 - RNA, 21 nt, synthetic construct
  misc_feature 1..21: note = Synthetic
  source 1..21: mol_type = other RNA
ggcagtgtcccgacccggatc

SEQ ID NO: 7992 - RNA, 21 nt, synthetic construct
  misc_feature 1..21: note = Synthetic
  source 1..21: mol_type = other RNA
ggcagttctcgatattcacga

SEQ ID NO: 7993 - RNA, 21 nt, synthetic construct
  misc_feature 1..21: note = Synthetic
  source 1..21: mol_type = other RNA
ggcataatcatagctcacgac

SEQ ID NO: 7994 - RNA, 21 nt, synthetic construct
  misc_feature 1..21: note = Synthetic
  source 1..21: mol_type = other RNA
ggcatcatttggtgaatgagt

SEQ ID NO: 7995 - RNA, 21 nt, synthetic construct
  misc_feature 1..21: note = Synthetic
  source 1..21: mol_type = other RNA
ggcattcattgacacgggctt

SEQ ID NO: 7996 - RNA, 21 nt, synthetic construct
  misc_feature 1..21: note = Synthetic
  source 1..21: mol_type = other RNA
ggcatttcagaggcaataacc

SEQ ID NO: 7997 - RNA, 21 nt, synthetic construct
  misc_feature 1..21: note = Synthetic
  source 1..21: mol_type = other RNA
ggcatttgcatagaagtggaa

SEQ ID NO: 7998 - RNA, 21 nt, synthetic construct
  misc_feature 1..21: note = Synthetic
  source 1..21: mol_type = other RNA
ggccaaattcattttttaaga

SEQ ID NO: 7999 - RNA, 21 nt, synthetic construct
  misc_feature 1..21: note = Synthetic
  source 1..21: mol_type = other RNA
ggccaaggagaaggggtgggc

SEQ ID NO: 8000 - RNA, 21 nt, synthetic construct
  misc_feature 1..21: note = Synthetic
  source 1..21: mol_type = other RNA
ggccaaggtaaccgggtgtct

SEQ ID NO: 8001 - RNA, 21 nt, synthetic construct
  misc_feature 1..21: note = Synthetic
  source 1..21: mol_type = other RNA
ggccacagcgcagttttcctc

SEQ ID NO: 8002 - RNA, 21 nt, synthetic construct
  misc_feature 1..21: note = Synthetic
  source 1..21: mol_type = other RNA
ggccacaggacagccttgctc

SEQ ID NO: 8003 - RNA, 21 nt, synthetic construct
  misc_feature 1..21: note = Synthetic
  source 1..21: mol_type = other RNA
ggccaccagctggaagccgtc

SEQ ID NO: 8004 - RNA, 21 nt, synthetic construct
  misc_feature 1..21: note = Synthetic
  source 1..21: mol_type = other RNA
ggccaccatcacagcgccagc

SEQ ID NO: 8005 - RNA, 21 nt, synthetic construct
  misc_feature 1..21: note = Synthetic
  source 1..21: mol_type = other RNA
ggccacctccgtgtccagagc

SEQ ID NO: 8006 - RNA, 21 nt, synthetic construct
  misc_feature 1..21: note = Synthetic
  source 1..21: mol_type = other RNA
ggccacgtgtcctcacggcca

SEQ ID NO: 8007 - RNA, 21 nt, synthetic construct
  misc_feature 1..21: note = Synthetic
  source 1..21: mol_type = other RNA
ggccactcatccgagccatct

SEQ ID NO: 8008 - RNA, 21 nt, synthetic construct
  misc_feature 1..21: note = Synthetic
  source 1..21: mol_type = other RNA
ggccactgaatgttttcagtc

SEQ ID NO: 8009 - RNA, 21 nt, synthetic construct
  misc_feature 1..21: note = Synthetic
  source 1..21: mol_type = other RNA
ggccactgaggagatctaggg

SEQ ID NO: 8010 - RNA, 21 nt, synthetic construct
  misc_feature 1..21: note = Synthetic
  source 1..21: mol_type = other RNA
ggccactgcagcctcagcctc

SEQ ID NO: 8011 - RNA, 21 nt, synthetic construct
  misc_feature 1..21: note = Synthetic
  source 1..21: mol_type = other RNA
ggccagactgcggactgcagt

SEQ ID NO: 8012 - RNA, 21 nt, synthetic construct
  misc_feature 1..21: note = Synthetic
  source 1..21: mol_type = other RNA
ggccagaggccatgggctgct

SEQ ID NO: 8013 - RNA, 21 nt, synthetic construct
  misc_feature 1..21: note = Synthetic
  source 1..21: mol_type = other RNA
ggccagcagcatgccgtccgg

SEQ ID NO: 8014 - RNA, 21 nt, synthetic construct
  misc_feature 1..21: note = Synthetic
  source 1..21: mol_type = other RNA
ggccagcctcttttcatcctc

SEQ ID NO: 8015 - RNA, 21 nt, synthetic construct
  misc_feature 1..21: note = Synthetic
  source 1..21: mol_type = other RNA
ggccagggggtcccgttggtg

SEQ ID NO: 8016 - RNA, 21 nt, synthetic construct
  misc_feature 1..21: note = Synthetic
  source 1..21: mol_type = other RNA
ggccatcgcacctccagaact

SEQ ID NO: 8017 - RNA, 21 nt, synthetic construct
  misc_feature 1..21: note = Synthetic
  source 1..21: mol_type = other RNA
ggccatgggctgctgatgcac

SEQ ID NO: 8018 - RNA, 21 nt, synthetic construct
  misc_feature 1..21: note = Synthetic
  source 1..21: mol_type = other RNA
ggcccacagctgggggatgca

SEQ ID NO: 8019 - RNA, 21 nt, synthetic construct
  misc_feature 1..21: note = Synthetic
  source 1..21: mol_type = other RNA
ggcccaggataacggagggcg

SEQ ID NO: 8020 - RNA, 21 nt, synthetic construct
  misc_feature 1..21: note = Synthetic
  source 1..21: mol_type = other RNA
ggccccaggcagccgggaggt

SEQ ID NO: 8021 - RNA, 21 nt, synthetic construct
  misc_feature 1..21: note = Synthetic
  source 1..21: mol_type = other RNA
ggccccatgctcgcagcctct

SEQ ID NO: 8022 - RNA, 21 nt, synthetic construct
  misc_feature 1..21: note = Synthetic
  source 1..21: mol_type = other RNA
ggcccccacagctgaagtccc

SEQ ID NO: 8023 - RNA, 21 nt, synthetic construct
  misc_feature 1..21: note = Synthetic
  source 1..21: mol_type = other RNA
ggccccctttcttgatcttgg

SEQ ID NO: 8024 - RNA, 21 nt, synthetic construct
  misc_feature 1..21: note = Synthetic
  source 1..21: mol_type = other RNA
ggccccgagaatagtcactga

SEQ ID NO: 8025 - RNA, 21 nt, synthetic construct
  misc_feature 1..21: note = Synthetic
  source 1..21: mol_type = other RNA
ggcccctctgtgaacttgatc

SEQ ID NO: 8026 - RNA, 21 nt, synthetic construct
  misc_feature 1..21: note = Synthetic
  source 1..21: mol_type = other RNA
ggcccttggcttggagccgtt

SEQ ID NO: 8027 - RNA, 21 nt, synthetic construct
  misc_feature 1..21: note = Synthetic
  source 1..21: mol_type = other RNA
ggccgagcaggggctactgtc

SEQ ID NO: 8028 - RNA, 21 nt, synthetic construct
  misc_feature 1..21: note = Synthetic
  source 1..21: mol_type = other RNA
ggccggcgaggtctcaggaag

SEQ ID NO: 8029 - RNA, 21 nt, synthetic construct
  misc_feature 1..21: note = Synthetic
  source 1..21: mol_type = other RNA
ggccgggggcccctctgtgaa

SEQ ID NO: 8030 - RNA, 21 nt, synthetic construct
  misc_feature 1..21: note = Synthetic
  source 1..21: mol_type = other RNA
ggcctcaccgtgcatgtttta

SEQ ID NO: 8031 - RNA, 21 nt, synthetic construct
  misc_feature 1..21: note = Synthetic
  source 1..21: mol_type = other RNA
ggcctcccaaagtgctgggat

SEQ ID NO: 8032 - RNA, 21 nt, synthetic construct
  misc_feature 1..21: note = Synthetic
  source 1..21: mol_type = other RNA
ggcctcgtctgagccgtccaa

SEQ ID NO: 8033 - RNA, 21 nt, synthetic construct
  misc_feature 1..21: note = Synthetic
  source 1..21: mol_type = other RNA
ggcctgacatcccctcccctt

SEQ ID NO: 8034 - RNA, 21 nt, synthetic construct
  misc_feature 1..21: note = Synthetic
  source 1..21: mol_type = other RNA
ggcctggatgtctctgctgat

SEQ ID NO: 8035 - RNA, 21 nt, synthetic construct
  misc_feature 1..21: note = Synthetic
  source 1..21: mol_type = other RNA
ggcctgggatcccatcccaac

SEQ ID NO: 8036 - RNA, 21 nt, synthetic construct
  misc_feature 1..21: note = Synthetic
  source 1..21: mol_type = other RNA
ggcctggtctccaactcctga

SEQ ID NO: 8037 - RNA, 21 nt, synthetic construct
  misc_feature 1..21: note = Synthetic
  source 1..21: mol_type = other RNA
ggcctgtttctcttatccttc

SEQ ID NO: 8038 - RNA, 21 nt, synthetic construct
  misc_feature 1..21: note = Synthetic
  source 1..21: mol_type = other RNA
ggccttcgtgtgggggtccag

SEQ ID NO: 8039 - RNA, 21 nt, synthetic construct
  misc_feature 1..21: note = Synthetic
  source 1..21: mol_type = other RNA
ggccttgagggtggccggggg

SEQ ID NO: 8040 - RNA, 21 nt, synthetic construct
  misc_feature 1..21: note = Synthetic
  source 1..21: mol_type = other RNA
ggcgacaggtggccacagcgc

SEQ ID NO: 8041 - RNA, 21 nt, synthetic construct
  misc_feature 1..21: note = Synthetic
  source 1..21: mol_type = other RNA
ggcgacaggtggccacaggac

SEQ ID NO: 8042 - RNA, 21 nt, synthetic construct
  misc_feature 1..21: note = Synthetic
  source 1..21: mol_type = other RNA
ggcgacggtccagcgcaattt

SEQ ID NO: 8043 - RNA, 21 nt, synthetic construct
  misc_feature 1..21: note = Synthetic
  source 1..21: mol_type = other RNA
ggcgactcgtgtatgtcgcgg

SEQ ID NO: 8044 - RNA, 21 nt, synthetic construct
  misc_feature 1..21: note = Synthetic
  source 1..21: mol_type = other RNA
ggcgaggagcaaggcgacggt

SEQ ID NO: 8045 - RNA, 21 nt, synthetic construct
  misc_feature 1..21: note = Synthetic
  source 1..21: mol_type = other RNA
ggcgagggcgccccccaggac

SEQ ID NO: 8046 - RNA, 21 nt, synthetic construct
  misc_feature 1..21: note = Synthetic
  source 1..21: mol_type = other RNA
ggcgaggtctcaggaagggtt

SEQ ID NO: 8047 - RNA, 21 nt, synthetic construct
  misc_feature 1..21: note = Synthetic
  source 1..21: mol_type = other RNA
ggcgagtgggggttgatctgc

SEQ ID NO: 8048 - RNA, 21 nt, synthetic construct
  misc_feature 1..21: note = Synthetic
  source 1..21: mol_type = other RNA
ggcgatcctcctgcctcagcc

SEQ ID NO: 8049 - RNA, 21 nt, synthetic construct
  misc_feature 1..21: note = Synthetic
  source 1..21: mol_type = other RNA
ggcgatggagcccacagcctt

SEQ ID NO: 8050 - RNA, 21 nt, synthetic construct
  misc_feature 1..21: note = Synthetic
  source 1..21: mol_type = other RNA
ggcgatggggaggacaatgga

SEQ ID NO: 8051 - RNA, 21 nt, synthetic construct
  misc_feature 1..21: note = Synthetic
  source 1..21: mol_type = other RNA
ggcgatttcagaaagaacctg

SEQ ID NO: 8052 - RNA, 21 nt, synthetic construct
  misc_feature 1..21: note = Synthetic
  source 1..21: mol_type = other RNA
ggcgcaatctcggctcactgc

SEQ ID NO: 8053 - RNA, 21 nt, synthetic construct
  misc_feature 1..21: note = Synthetic
  source 1..21: mol_type = other RNA
ggcgcaggtaaacttgggcga

SEQ ID NO: 8054 - RNA, 21 nt, synthetic construct
  misc_feature 1..21: note = Synthetic
  source 1..21: mol_type = other RNA
ggcgccccccaggacaaggtg

SEQ ID NO: 8055 - RNA, 21 nt, synthetic construct
  misc_feature 1..21: note = Synthetic
  source 1..21: mol_type = other RNA
ggcggacataaagacgacaat

SEQ ID NO: 8056 - RNA, 21 nt, synthetic construct
  misc_feature 1..21: note = Synthetic
  source 1..21: mol_type = other RNA
ggcggccactgaggagatcta

SEQ ID NO: 8057 - RNA, 21 nt, synthetic construct
  misc_feature 1..21: note = Synthetic
  source 1..21: mol_type = other RNA
ggcggctccggggacccggga

SEQ ID NO: 8058 - RNA, 21 nt, synthetic construct
  misc_feature 1..21: note = Synthetic
  source 1..21: mol_type = other RNA
ggcgggaccacaggtgagcac

SEQ ID NO: 8059 - RNA, 21 nt, synthetic construct
  misc_feature 1..21: note = Synthetic
  source 1..21: mol_type = other RNA
ggcgggagttccccagtcagt

SEQ ID NO: 8060 - RNA, 21 nt, synthetic construct
  misc_feature 1..21: note = Synthetic
  source 1..21: mol_type = other RNA
ggcggggagattctgaggcaa

SEQ ID NO: 8061 - RNA, 21 nt, synthetic construct
  misc_feature 1..21: note = Synthetic
  source 1..21: mol_type = other RNA
ggcggttggcactgaaaatgg

SEQ ID NO: 8062 - RNA, 21 nt, synthetic construct
  misc_feature 1..21: note = Synthetic
  source 1..21: mol_type = other RNA
ggcgtgagccactgcgcccgg

SEQ ID NO: 8063 - RNA, 21 nt, synthetic construct
  misc_feature 1..21: note = Synthetic
  source 1..21: mol_type = other RNA
ggcgtgaggcacctgtgtctg

SEQ ID NO: 8064 - RNA, 21 nt, synthetic construct
  misc_feature 1..21: note = Synthetic
  source 1..21: mol_type = other RNA
ggctaacctggctgtctagca

SEQ ID NO: 8065 - RNA, 21 nt, synthetic construct
  misc_feature 1..21: note = Synthetic
  source 1..21: mol_type = other RNA
ggctaattttttgtattttta

SEQ ID NO: 8066 - RNA, 21 nt, synthetic construct
  misc_feature 1..21: note = Synthetic
  source 1..21: mol_type = other RNA
ggctacaaaaaccttctatac

SEQ ID NO: 8067 - RNA, 21 nt, synthetic construct
  misc_feature 1..21: note = Synthetic
  source 1..21: mol_type = other RNA
ggctactgtccccttggaaca

SEQ ID NO: 8068 - RNA, 21 nt, synthetic construct
  misc_feature 1..21: note = Synthetic
  source 1..21: mol_type = other RNA
ggctcactgcaacctccacct

SEQ ID NO: 8069 - RNA, 21 nt, synthetic construct
  misc_feature 1..21: note = Synthetic
  source 1..21: mol_type = other RNA
ggctcactgcaagctccgctt

SEQ ID NO: 8070 - RNA, 21 nt, synthetic construct
  misc_feature 1..21: note = Synthetic
  source 1..21: mol_type = other RNA
ggctcaggcgatcctcctgcc

SEQ ID NO: 8071 - RNA, 21 nt, synthetic construct
  misc_feature 1..21: note = Synthetic
  source 1..21: mol_type = other RNA
ggctccggggacccgggactt

SEQ ID NO: 8072 - RNA, 21 nt, synthetic construct
  misc_feature 1..21: note = Synthetic
  source 1..21: mol_type = other RNA
ggctcgatcatggctcactgc

SEQ ID NO: 8073 - RNA, 21 nt, synthetic construct
  misc_feature 1..21: note = Synthetic
  source 1..21: mol_type = other RNA
ggctctgcctctgggaagtgg

SEQ ID NO: 8074 - RNA, 21 nt, synthetic construct
  misc_feature 1..21: note = Synthetic
  source 1..21: mol_type = other RNA
ggctctgtcaagctgggtgct

SEQ ID NO: 8075 - RNA, 21 nt, synthetic construct
  misc_feature 1..21: note = Synthetic
  source 1..21: mol_type = other RNA
ggctgaagatctcggctgcag

SEQ ID NO: 8076 - RNA, 21 nt, synthetic construct
  misc_feature 1..21: note = Synthetic
  source 1..21: mol_type = other RNA
ggctgcagaccaaggaggggc

SEQ ID NO: 8077 - RNA, 21 nt, synthetic construct
  misc_feature 1..21: note = Synthetic
  source 1..21: mol_type = other RNA
ggctgcaggtgtcgggatcct

SEQ ID NO: 8078 - RNA, 21 nt, synthetic construct
  misc_feature 1..21: note = Synthetic
  source 1..21: mol_type = other RNA
ggctgccatggatgcagtttc

SEQ ID NO: 8079 - RNA, 21 nt, synthetic construct
  misc_feature 1..21: note = Synthetic
  source 1..21: mol_type = other RNA
ggctgctgatgcaccatgcat

SEQ ID NO: 8080 - RNA, 21 nt, synthetic construct
  misc_feature 1..21: note = Synthetic
  source 1..21: mol_type = other RNA
ggctggaaagcagtggcataa

SEQ ID NO: 8081 - RNA, 21 nt, synthetic construct
  misc_feature 1..21: note = Synthetic
  source 1..21: mol_type = other RNA
ggctggagtgcagtggctcga

SEQ ID NO: 8082 - RNA, 21 nt, synthetic construct
  misc_feature 1..21: note = Synthetic
  source 1..21: mol_type = other RNA
ggctgggtgaggttgtggaag

SEQ ID NO: 8083 - RNA, 21 nt, synthetic construct
  misc_feature 1..21: note = Synthetic
  source 1..21: mol_type = other RNA
ggctggtggggcgagggcgcc

SEQ ID NO: 8084 - RNA, 21 nt, synthetic construct
  misc_feature 1..21: note = Synthetic
  source 1..21: mol_type = other RNA
ggctggtgtactcgctccggt

SEQ ID NO: 8085 - RNA, 21 nt, synthetic construct
  misc_feature 1..21: note = Synthetic
  source 1..21: mol_type = other RNA
ggctggtgtcctgacagccac

SEQ ID NO: 8086 - RNA, 21 nt, synthetic construct
  misc_feature 1..21: note = Synthetic
  source 1..21: mol_type = other RNA
ggctgtcactgtctctccgga

SEQ ID NO: 8087 - RNA, 21 nt, synthetic construct
  misc_feature 1..21: note = Synthetic
  source 1..21: mol_type = other RNA
ggctgtctagcaaggcttgca

SEQ ID NO: 8088 - RNA, 21 nt, synthetic construct
  misc_feature 1..21: note = Synthetic
  source 1..21: mol_type = other RNA
ggctgtggagctgacctttag

SEQ ID NO: 8089 - RNA, 21 nt, synthetic construct
  misc_feature 1..21: note = Synthetic
  source 1..21: mol_type = other RNA
ggcttaaggaaggtacaaacc

SEQ ID NO: 8090 - RNA, 21 nt, synthetic construct
  misc_feature 1..21: note = Synthetic
  source 1..21: mol_type = other RNA
ggcttagagattggtggatga

SEQ ID NO: 8091 - RNA, 21 nt, synthetic construct
  misc_feature 1..21: note = Synthetic
  source 1..21: mol_type = other RNA
ggcttatcacggttccctgca

SEQ ID NO: 8092 - RNA, 21 nt, synthetic construct
  misc_feature 1..21: note = Synthetic
  source 1..21: mol_type = other RNA
ggcttcgttgatgatatctgt

SEQ ID NO: 8093 - RNA, 21 nt, synthetic construct
  misc_feature 1..21: note = Synthetic
  source 1..21: mol_type = other RNA
ggcttcttctcatttcctctg

SEQ ID NO: 8094 - RNA, 21 nt, synthetic construct
  misc_feature 1..21: note = Synthetic
  source 1..21: mol_type = other RNA
ggcttgcatagaagaggtaaa

SEQ ID NO: 8095 - RNA, 21 nt, synthetic construct
  misc_feature 1..21: note = Synthetic
  source 1..21: mol_type = other RNA
ggcttggagccgttctccctg

SEQ ID NO: 8096 - RNA, 21 nt, synthetic construct
  misc_feature 1..21: note = Synthetic
  source 1..21: mol_type = other RNA
ggcttggaggcatttgcatag

SEQ ID NO: 8097 - RNA, 21 nt, synthetic construct
  misc_feature 1..21: note = Synthetic
  source 1..21: mol_type = other RNA
ggctttccctggcctgggatc

SEQ ID NO: 8098 - RNA, 21 nt, synthetic construct
  misc_feature 1..21: note = Synthetic
  source 1..21: mol_type = other RNA
ggctttgaagtcccggtcaac

SEQ ID NO: 8099 - RNA, 21 nt, synthetic construct
  misc_feature 1..21: note = Synthetic
  source 1..21: mol_type = other RNA
gggaacagccgccgttgttgt

SEQ ID NO: 8100 - RNA, 21 nt, synthetic construct
  misc_feature 1..21: note = Synthetic
  source 1..21: mol_type = other RNA
gggaacaggtcgggtggttgt

SEQ ID NO: 8101 - RNA, 21 nt, synthetic construct
  misc_feature 1..21: note = Synthetic
  source 1..21: mol_type = other RNA
gggaagtgaatggcttggagg

SEQ ID NO: 8102 - RNA, 21 nt, synthetic construct
  misc_feature 1..21: note = Synthetic
  source 1..21: mol_type = other RNA
gggaagtggcatcatttggtg

SEQ ID NO: 8103 - RNA, 21 nt, synthetic construct
  misc_feature 1..21: note = Synthetic
  source 1..21: mol_type = other RNA
gggaatggaagtgggtagggg

SEQ ID NO: 8104 - RNA, 21 nt, synthetic construct
  misc_feature 1..21: note = Synthetic
  source 1..21: mol_type = other RNA
gggacaattgccaatcccttg

SEQ ID NO: 8105 - RNA, 21 nt, synthetic construct
  misc_feature 1..21: note = Synthetic
  source 1..21: mol_type = other RNA
gggacacagtgttttgtccct

SEQ ID NO: 8106 - RNA, 21 nt, synthetic construct
  misc_feature 1..21: note = Synthetic
  source 1..21: mol_type = other RNA
gggacagccttgctcgtctga

SEQ ID NO: 8107 - RNA, 21 nt, synthetic construct
  misc_feature 1..21: note = Synthetic
  source 1..21: mol_type = other RNA
gggacaggtcagaccagtaga

SEQ ID NO: 8108 - RNA, 21 nt, synthetic construct
  misc_feature 1..21: note = Synthetic
  source 1..21: mol_type = other RNA
gggacagtaggttttcagcca

SEQ ID NO: 8109 - RNA, 21 nt, synthetic construct
  misc_feature 1..21: note = Synthetic
  source 1..21: mol_type = other RNA
gggacatcattctcccaaaaa

SEQ ID NO: 8110 - RNA, 21 nt, synthetic construct
  misc_feature 1..21: note = Synthetic
  source 1..21: mol_type = other RNA
gggaccacaggtgagcaccgg

SEQ ID NO: 8111 - RNA, 21 nt, synthetic construct
  misc_feature 1..21: note = Synthetic
  source 1..21: mol_type = other RNA
gggacccgggacttgtcgtcg

SEQ ID NO: 8112 - RNA, 21 nt, synthetic construct
  misc_feature 1..21: note = Synthetic
  source 1..21: mol_type = other RNA
gggacgcatttacgtgctccg

SEQ ID NO: 8113 - RNA, 21 nt, synthetic construct
  misc_feature 1..21: note = Synthetic
  source 1..21: mol_type = other RNA
gggacggaggtgtcgccacag

SEQ ID NO: 8114 - RNA, 21 nt, synthetic construct
  misc_feature 1..21: note = Synthetic
  source 1..21: mol_type = other RNA
gggacgggactccaggcagat

SEQ ID NO: 8115 - RNA, 21 nt, synthetic construct
  misc_feature 1..21: note = Synthetic
  source 1..21: mol_type = other RNA
gggactacaggtgcccgccac

SEQ ID NO: 8116 - RNA, 21 nt, synthetic construct
  misc_feature 1..21: note = Synthetic
  source 1..21: mol_type = other RNA
gggactcatcagagccatcct

SEQ ID NO: 8117 - RNA, 21 nt, synthetic construct
  misc_feature 1..21: note = Synthetic
  source 1..21: mol_type = other RNA
gggactccaggcagatgttca

SEQ ID NO: 8118 - RNA, 21 nt, synthetic construct
  misc_feature 1..21: note = Synthetic
  source 1..21: mol_type = other RNA
gggacttcgccaggagggccc

SEQ ID NO: 8119 - RNA, 21 nt, synthetic construct
  misc_feature 1..21: note = Synthetic
  source 1..21: mol_type = other RNA
gggacttgtcgtcgcctttgt

SEQ ID NO: 8120 - RNA, 21 nt, synthetic construct
  misc_feature 1..21: note = Synthetic
  source 1..21: mol_type = other RNA
gggagaggcacgctctgtcac

SEQ ID NO: 8121 - RNA, 21 nt, synthetic construct
  misc_feature 1..21: note = Synthetic
  source 1..21: mol_type = other RNA
gggagattctgaggcaacgtt

SEQ ID NO: 8122 - RNA, 21 nt, synthetic construct
  misc_feature 1..21: note = Synthetic
  source 1..21: mol_type = other RNA
gggagcacgtctcctgggact

SEQ ID NO: 8123 - RNA, 21 nt, synthetic construct
  misc_feature 1..21: note = Synthetic
  source 1..21: mol_type = other RNA
gggagcacgtcttgggggagc

SEQ ID NO: 8124 - RNA, 21 nt, synthetic construct
  misc_feature 1..21: note = Synthetic
  source 1..21: mol_type = other RNA
gggagcacgtcttggggggac

SEQ ID NO: 8125 - RNA, 21 nt, synthetic construct
  misc_feature 1..21: note = Synthetic
  source 1..21: mol_type = other RNA
gggaggacaatggacagagcc

SEQ ID NO: 8126 - RNA, 21 nt, synthetic construct
  misc_feature 1..21: note = Synthetic
  source 1..21: mol_type = other RNA
gggaggatgggcaccaggctg

SEQ ID NO: 8127 - RNA, 21 nt, synthetic construct
  misc_feature 1..21: note = Synthetic
  source 1..21: mol_type = other RNA
gggaggcacagatactggcag

SEQ ID NO: 8128 - RNA, 21 nt, synthetic construct
  misc_feature 1..21: note = Synthetic
  source 1..21: mol_type = other RNA
gggaggtgtcgggaacaggtc

SEQ ID NO: 8129 - RNA, 21 nt, synthetic construct
  misc_feature 1..21: note = Synthetic
  source 1..21: mol_type = other RNA
gggagtctgacggaggctgtc

SEQ ID NO: 8130 - RNA, 21 nt, synthetic construct
  misc_feature 1..21: note = Synthetic
  source 1..21: mol_type = other RNA
gggagttccccagtcagtcca

SEQ ID NO: 8131 - RNA, 21 nt, synthetic construct
  misc_feature 1..21: note = Synthetic
  source 1..21: mol_type = other RNA
gggatcacaggcacgtgccac

SEQ ID NO: 8132 - RNA, 21 nt, synthetic construct
  misc_feature 1..21: note = Synthetic
  source 1..21: mol_type = other RNA
gggatcccatcccaacacaca

SEQ ID NO: 8133 - RNA, 21 nt, synthetic construct
  misc_feature 1..21: note = Synthetic
  source 1..21: mol_type = other RNA
gggatcctgacactcatcgat

SEQ ID NO: 8134 - RNA, 21 nt, synthetic construct
  misc_feature 1..21: note = Synthetic
  source 1..21: mol_type = other RNA
gggatctcgctttgttgctca

SEQ ID NO: 8135 - RNA, 21 nt, synthetic construct
  misc_feature 1..21: note = Synthetic
  source 1..21: mol_type = other RNA
gggatgaggctggtgtactcg

SEQ ID NO: 8136 - RNA, 21 nt, synthetic construct
  misc_feature 1..21: note = Synthetic
  source 1..21: mol_type = other RNA
gggatgcaggtggagctgttg

SEQ ID NO: 8137 - RNA, 21 nt, synthetic construct
  misc_feature 1..21: note = Synthetic
  source 1..21: mol_type = other RNA
gggattacaggcgtgagccac

SEQ ID NO: 8138 - RNA, 21 nt, synthetic construct
  misc_feature 1..21: note = Synthetic
  source 1..21: mol_type = other RNA
gggattacaggcgtgaggcac

SEQ ID NO: 8139 - RNA, 21 nt, synthetic construct
  misc_feature 1..21: note = Synthetic
  source 1..21: mol_type = other RNA
gggcaaaggctaacctggctg

SEQ ID NO: 8140 - RNA, 21 nt, synthetic construct
  misc_feature 1..21: note = Synthetic
  source 1..21: mol_type = other RNA
gggcacaggcactcgtagccg

SEQ ID NO: 8141 - RNA, 21 nt, synthetic construct
  misc_feature 1..21: note = Synthetic
  source 1..21: mol_type = other RNA
gggcaccaggctggtgtcctg

SEQ ID NO: 8142 - RNA, 21 nt, synthetic construct
  misc_feature 1..21: note = Synthetic
  source 1..21: mol_type = other RNA
gggcactgtccgaagcctgtt

SEQ ID NO: 8143 - RNA, 21 nt, synthetic construct
  misc_feature 1..21: note = Synthetic
  source 1..21: mol_type = other RNA
gggcaggaggcctcgtctgag

SEQ ID NO: 8144 - RNA, 21 nt, synthetic construct
  misc_feature 1..21: note = Synthetic
  source 1..21: mol_type = other RNA
gggcaggcgcaggtaaacttg

SEQ ID NO: 8145 - RNA, 21 nt, synthetic construct
  misc_feature 1..21: note = Synthetic
  source 1..21: mol_type = other RNA
gggcagggacgggactccagg

SEQ ID NO: 8146 - RNA, 21 nt, synthetic construct
  misc_feature 1..21: note = Synthetic
  source 1..21: mol_type = other RNA
gggcagggaggcacagatact

SEQ ID NO: 8147 - RNA, 21 nt, synthetic construct
  misc_feature 1..21: note = Synthetic
  source 1..21: mol_type = other RNA
gggccaccagctggaagccgt

SEQ ID NO: 8148 - RNA, 21 nt, synthetic construct
  misc_feature 1..21: note = Synthetic
  source 1..21: mol_type = other RNA
gggccaccatcacagcgccag

SEQ ID NO: 8149 - RNA, 21 nt, synthetic construct
  misc_feature 1..21: note = Synthetic
  source 1..21: mol_type = other RNA
gggccactgaatgttttcagt

SEQ ID NO: 8150 - RNA, 21 nt, synthetic construct
  misc_feature 1..21: note = Synthetic
  source 1..21: mol_type = other RNA
gggccagcctcttttcatcct

SEQ ID NO: 8151 - RNA, 21 nt, synthetic construct
  misc_feature 1..21: note = Synthetic
  source 1..21: mol_type = other RNA
gggccagggggtcccgttggt

SEQ ID NO: 8152 - RNA, 21 nt, synthetic construct
  misc_feature 1..21: note = Synthetic
  source 1..21: mol_type = other RNA
gggcccaggataacggagggc

SEQ ID NO: 8153 - RNA, 21 nt, synthetic construct
  misc_feature 1..21: note = Synthetic
  source 1..21: mol_type = other RNA
gggccccatgctcgcagcctc

SEQ ID NO: 8154 - RNA, 21 nt, synthetic construct
  misc_feature 1..21: note = Synthetic
  source 1..21: mol_type = other RNA
gggccccgagaatagtcactg

SEQ ID NO: 8155 - RNA, 21 nt, synthetic construct
  misc_feature 1..21: note = Synthetic
  source 1..21: mol_type = other RNA
gggcccctctgtgaacttgat

SEQ ID NO: 8156 - RNA, 21 nt, synthetic construct
  misc_feature 1..21: note = Synthetic
  source 1..21: mol_type = other RNA
gggcctgacatcccctcccct

SEQ ID NO: 8157 - RNA, 21 nt, synthetic construct
  misc_feature 1..21: note = Synthetic
  source 1..21: mol_type = other RNA
gggcctggatgtctctgctga

SEQ ID NO: 8158 - RNA, 21 nt, synthetic construct
  misc_feature 1..21: note = Synthetic
  source 1..21: mol_type = other RNA
gggcctgtttctcttatcctt

SEQ ID NO: 8159 - RNA, 21 nt, synthetic construct
  misc_feature 1..21: note = Synthetic
  source 1..21: mol_type = other RNA
gggcgacaggtggccacagcg

SEQ ID NO: 8160 - RNA, 21 nt, synthetic construct
  misc_feature 1..21: note = Synthetic
  source 1..21: mol_type = other RNA
gggcgacaggtggccacagga

SEQ ID NO: 8161 - RNA, 21 nt, synthetic construct
  misc_feature 1..21: note = Synthetic
  source 1..21: mol_type = other RNA
gggcgactcgtgtatgtcgcg

SEQ ID NO: 8162 - RNA, 21 nt, synthetic construct
  misc_feature 1..21: note = Synthetic
  source 1..21: mol_type = other RNA
gggcgagggcgccccccagga

SEQ ID NO: 8163 - RNA, 21 nt, synthetic construct
  misc_feature 1..21: note = Synthetic
  source 1..21: mol_type = other RNA
gggcgagtgggggttgatctg

SEQ ID NO: 8164 - RNA, 21 nt, synthetic construct
  misc_feature 1..21: note = Synthetic
  source 1..21: mol_type = other RNA
gggcgccccccaggacaaggt

SEQ ID NO: 8165 - RNA, 21 nt, synthetic construct
  misc_feature 1..21: note = Synthetic
  source 1..21: mol_type = other RNA
gggcggacataaagacgacaa

SEQ ID NO: 8166 - RNA, 21 nt, synthetic construct
  misc_feature 1..21: note = Synthetic
  source 1..21: mol_type = other RNA
gggcggggagattctgaggca

SEQ ID NO: 8167 - RNA, 21 nt, synthetic construct
  misc_feature 1..21: note = Synthetic
  source 1..21: mol_type = other RNA
gggctactgtccccttggaac

SEQ ID NO: 8168 - RNA, 21 nt, synthetic construct
  misc_feature 1..21: note = Synthetic
  source 1..21: mol_type = other RNA
gggctcaggcgatcctcctgc

SEQ ID NO: 8169 - RNA, 21 nt, synthetic construct
  misc_feature 1..21: note = Synthetic
  source 1..21: mol_type = other RNA
gggctctgtcaagctgggtgc

SEQ ID NO: 8170 - RNA, 21 nt, synthetic construct
  misc_feature 1..21: note = Synthetic
  source 1..21: mol_type = other RNA
gggctgctgatgcaccatgca

SEQ ID NO: 8171 - RNA, 21 nt, synthetic construct
  misc_feature 1..21: note = Synthetic
  source 1..21: mol_type = other RNA
gggctggtggggcgagggcgc

SEQ ID NO: 8172 - RNA, 21 nt, synthetic construct
  misc_feature 1..21: note = Synthetic
  source 1..21: mol_type = other RNA
gggcttcttctcatttcctct

SEQ ID NO: 8173 - RNA, 21 nt, synthetic construct
  misc_feature 1..21: note = Synthetic
  source 1..21: mol_type = other RNA
gggctttccctggcctgggat

SEQ ID NO: 8174 - RNA, 21 nt, synthetic construct
  misc_feature 1..21: note = Synthetic
  source 1..21: mol_type = other RNA
ggggaagtgaatggcttggag

SEQ ID NO: 8175 - RNA, 21 nt, synthetic construct
  misc_feature 1..21: note = Synthetic
  source 1..21: mol_type = other RNA
ggggacaattgccaatccctt

SEQ ID NO: 8176 - RNA, 21 nt, synthetic construct
  misc_feature 1..21: note = Synthetic
  source 1..21: mol_type = other RNA
ggggacacagtgttttgtccc

SEQ ID NO: 8177 - RNA, 21 nt, synthetic construct
  misc_feature 1..21: note = Synthetic
  source 1..21: mol_type = other RNA
ggggacagccttgctcgtctg

SEQ ID NO: 8178 - RNA, 21 nt, synthetic construct
  misc_feature 1..21: note = Synthetic
  source 1..21: mol_type = other RNA
ggggacagtaggttttcagcc

SEQ ID NO: 8179 - RNA, 21 nt, synthetic construct
  misc_feature 1..21: note = Synthetic
  source 1..21: mol_type = other RNA
ggggacatcattctcccaaaa

SEQ ID NO: 8180 - RNA, 21 nt, synthetic construct
  misc_feature 1..21: note = Synthetic
  source 1..21: mol_type = other RNA
ggggacccgggacttgtcgtc

SEQ ID NO: 8181 - RNA, 21 nt, synthetic construct
  misc_feature 1..21: note = Synthetic
  source 1..21: mol_type = other RNA
ggggacggaggtgtcgccaca

SEQ ID NO: 8182 - RNA, 21 nt, synthetic construct
  misc_feature 1..21: note = Synthetic
  source 1..21: mol_type = other RNA
ggggacttcgccaggagggcc

SEQ ID NO: 8183 - RNA, 21 nt, synthetic construct
  misc_feature 1..21: note = Synthetic
  source 1..21: mol_type = other RNA
ggggagattctgaggcaacgt

SEQ ID NO: 8184 - RNA, 21 nt, synthetic construct
  misc_feature 1..21: note = Synthetic
  source 1..21: mol_type = other RNA
ggggagcacgtctcctgggac

SEQ ID NO: 8185 - RNA, 21 nt, synthetic construct
  misc_feature 1..21: note = Synthetic
  source 1..21: mol_type = other RNA
ggggaggacaatggacagagc

SEQ ID NO: 8186 - RNA, 21 nt, synthetic construct
  misc_feature 1..21: note = Synthetic
  source 1..21: mol_type = other RNA
ggggatgaggctggtgtactc

SEQ ID NO: 8187 - RNA, 21 nt, synthetic construct
  misc_feature 1..21: note = Synthetic
  source 1..21: mol_type = other RNA
ggggatgcaggtggagctgtt

SEQ ID NO: 8188 - RNA, 21 nt, synthetic construct
  misc_feature 1..21: note = Synthetic
  source 1..21: mol_type = other RNA
ggggcacaggcactcgtagcc

SEQ ID NO: 8189 - RNA, 21 nt, synthetic construct
  misc_feature 1..21: note = Synthetic
  source 1..21: mol_type = other RNA
ggggcagggaggcacagatac

SEQ ID NO: 8190 - RNA, 21 nt, synthetic construct
  misc_feature 1..21: note = Synthetic
  source 1..21: mol_type = other RNA
ggggccaccatcacagcgcca

SEQ ID NO: 8191 - RNA, 21 nt, synthetic construct
  misc_feature 1..21: note = Synthetic
  source 1..21: mol_type = other RNA
ggggcccctctgtgaacttga

SEQ ID NO: 8192 - RNA, 21 nt, synthetic construct
  misc_feature 1..21: note = Synthetic
  source 1..21: mol_type = other RNA
ggggcctggatgtctctgctg

SEQ ID NO: 8193 - RNA, 21 nt, synthetic construct
  misc_feature 1..21: note = Synthetic
  source 1..21: mol_type = other RNA
ggggcgagggcgccccccagg

SEQ ID NO: 8194 - RNA, 21 nt, synthetic construct
  misc_feature 1..21: note = Synthetic
  source 1..21: mol_type = other RNA
ggggcggggagattctgaggc

SEQ ID NO: 8195 - RNA, 21 nt, synthetic construct
  misc_feature 1..21: note = Synthetic
  source 1..21: mol_type = other RNA
ggggctactgtccccttggaa

SEQ ID NO: 8196 - RNA, 21 nt, synthetic construct
  misc_feature 1..21: note = Synthetic
  source 1..21: mol_type = other RNA
ggggctggtggggcgagggcg

SEQ ID NO: 8197 - RNA, 21 nt, synthetic construct
  misc_feature 1..21: note = Synthetic
  source 1..21: mol_type = other RNA
gggggacacagtgttttgtcc

SEQ ID NO: 8198 - RNA, 21 nt, synthetic construct
  misc_feature 1..21: note = Synthetic
  source 1..21: mol_type = other RNA
gggggacagccttgctcgtct

SEQ ID NO: 8199 - RNA, 21 nt, synthetic construct
  misc_feature 1..21: note = Synthetic
  source 1..21: mol_type = other RNA
gggggagcacgtctcctggga

SEQ ID NO: 8200 - RNA, 21 nt, synthetic construct
  misc_feature 1..21: note = Synthetic
  source 1..21: mol_type = other RNA
gggggatgcaggtggagctgt

SEQ ID NO: 8201 - RNA, 21 nt, synthetic construct
  misc_feature 1..21: note = Synthetic
  source 1..21: mol_type = other RNA
gggggcccctctgtgaacttg

SEQ ID NO: 8202 - RNA, 21 nt, synthetic construct
  misc_feature 1..21: note = Synthetic
  source 1..21: mol_type = other RNA
gggggcctggatgtctctgct

SEQ ID NO: 8203 - RNA, 21 nt, synthetic construct
  misc_feature 1..21: note = Synthetic
  source 1..21: mol_type = other RNA
ggggggacacagtgttttgtc

SEQ ID NO: 8204 - RNA, 21 nt, synthetic construct
  misc_feature 1..21: note = Synthetic
  source 1..21: mol_type = other RNA
ggggggacagccttgctcgtc

SEQ ID NO: 8205 - RNA, 21 nt, synthetic construct
  misc_feature 1..21: note = Synthetic
  source 1..21: mol_type = other RNA
gggggggacacagtgttttgt

SEQ ID NO: 8206 - RNA, 21 nt, synthetic construct
  misc_feature 1..21: note = Synthetic
  source 1..21: mol_type = other RNA
gggggtccagctggaagcctt

SEQ ID NO: 8207 - RNA, 21 nt, synthetic construct
  misc_feature 1..21: note = Synthetic
  source 1..21: mol_type = other RNA
gggggtcccgttggtgccatc

SEQ ID NO: 8208 - RNA, 21 nt, synthetic construct
  misc_feature 1..21: note = Synthetic
  source 1..21: mol_type = other RNA
gggggtgacagggcaaaggct

SEQ ID NO: 8209 - RNA, 21 nt, synthetic construct
  misc_feature 1..21: note = Synthetic
  source 1..21: mol_type = other RNA
gggggttgatctgcggggcag

SEQ ID NO: 8210 - RNA, 21 nt, synthetic construct
  misc_feature 1..21: note = Synthetic
  source 1..21: mol_type = other RNA
ggggtagctgtagccgtcctg

SEQ ID NO: 8211 - RNA, 21 nt, synthetic construct
  misc_feature 1..21: note = Synthetic
  source 1..21: mol_type = other RNA
ggggtccagctggaagccttc

SEQ ID NO: 8212 - RNA, 21 nt, synthetic construct
  misc_feature 1..21: note = Synthetic
  source 1..21: mol_type = other RNA
ggggtcccgttggtgccatct

SEQ ID NO: 8213 - RNA, 21 nt, synthetic construct
  misc_feature 1..21: note = Synthetic
  source 1..21: mol_type = other RNA
ggggtcgggaggatgggcacc

SEQ ID NO: 8214 - RNA, 21 nt, synthetic construct
  misc_feature 1..21: note = Synthetic
  source 1..21: mol_type = other RNA
ggggtcgttgtcgcaggccca

SEQ ID NO: 8215 - RNA, 21 nt, synthetic construct
  misc_feature 1..21: note = Synthetic
  source 1..21: mol_type = other RNA
ggggtcttactatgttgccca

SEQ ID NO: 8216 - RNA, 21 nt, synthetic construct
  misc_feature 1..21: note = Synthetic
  source 1..21: mol_type = other RNA
ggggtgacagggcaaaggcta

SEQ ID NO: 8217 - RNA, 21 nt, synthetic construct
  misc_feature 1..21: note = Synthetic
  source 1..21: mol_type = other RNA
ggggtggccccaggcagccgg

SEQ ID NO: 8218 - RNA, 21 nt, synthetic construct
  misc_feature 1..21: note = Synthetic
  source 1..21: mol_type = other RNA
ggggtgggccagcctcttttc

SEQ ID NO: 8219 - RNA, 21 nt, synthetic construct
  misc_feature 1..21: note = Synthetic
  source 1..21: mol_type = other RNA
ggggttgatctgcggggcagg

SEQ ID NO: 8220 - RNA, 21 nt, synthetic construct
  misc_feature 1..21: note = Synthetic
  source 1..21: mol_type = other RNA
ggggttgtcaaagttgatgct

SEQ ID NO: 8221 - RNA, 21 nt, synthetic construct
  misc_feature 1..21: note = Synthetic
  source 1..21: mol_type = other RNA
ggggtttcacgtgttagccag

SEQ ID NO: 8222 - RNA, 21 nt, synthetic construct
  misc_feature 1..21: note = Synthetic
  source 1..21: mol_type = other RNA
ggggtttggcttagagattgg

SEQ ID NO: 8223 - RNA, 21 nt, synthetic construct
  misc_feature 1..21: note = Synthetic
  source 1..21: mol_type = other RNA
gggtagctgtagccgtcctgg

SEQ ID NO: 8224 - RNA, 21 nt, synthetic construct
  misc_feature 1..21: note = Synthetic
  source 1..21: mol_type = other RNA
gggtaggggtcgggaggatgg

SEQ ID NO: 8225 - RNA, 21 nt, synthetic construct
  misc_feature 1..21: note = Synthetic
  source 1..21: mol_type = other RNA
gggtcatgattcgggggtgac

SEQ ID NO: 8226 - RNA, 21 nt, synthetic construct
  misc_feature 1..21: note = Synthetic
  source 1..21: mol_type = other RNA
gggtccagctggaagccttcc

SEQ ID NO: 8227 - RNA, 21 nt, synthetic construct
  misc_feature 1..21: note = Synthetic
  source 1..21: mol_type = other RNA
gggtcccgttggtgccatctg

SEQ ID NO: 8228 - RNA, 21 nt, synthetic construct
  misc_feature 1..21: note = Synthetic
  source 1..21: mol_type = other RNA
gggtccctcgcagagtgtcac

SEQ ID NO: 8229 - RNA, 21 nt, synthetic construct
  misc_feature 1..21: note = Synthetic
  source 1..21: mol_type = other RNA
gggtccctcgcagagtgtcag

SEQ ID NO: 8230 - RNA, 21 nt, synthetic construct
  misc_feature 1..21: note = Synthetic
  source 1..21: mol_type = other RNA
gggtcgggaggatgggcacca

SEQ ID NO: 8231 - RNA, 21 nt, synthetic construct
  misc_feature 1..21: note = Synthetic
  source 1..21: mol_type = other RNA
gggtcgttgtcgcaggcccac

SEQ ID NO: 8232 - RNA, 21 nt, synthetic construct
  misc_feature 1..21: note = Synthetic
  source 1..21: mol_type = other RNA
gggtcttactatgttgcccag

SEQ ID NO: 8233 - RNA, 21 nt, synthetic construct
  misc_feature 1..21: note = Synthetic
  source 1..21: mol_type = other RNA
gggtcttcatctgttgcccag

SEQ ID NO: 8234 - RNA, 21 nt, synthetic construct
  misc_feature 1..21: note = Synthetic
  source 1..21: mol_type = other RNA
gggtgacagggcaaaggctaa

SEQ ID NO: 8235 - RNA, 21 nt, synthetic construct
  misc_feature 1..21: note = Synthetic
  source 1..21: mol_type = other RNA
gggtgaccagtgactcaggct

SEQ ID NO: 8236 - RNA, 21 nt, synthetic construct
  misc_feature 1..21: note = Synthetic
  source 1..21: mol_type = other RNA
gggtgaggttgtggaagagaa

SEQ ID NO: 8237 - RNA, 21 nt, synthetic construct
  misc_feature 1..21: note = Synthetic
  source 1..21: mol_type = other RNA
gggtgatgcattcgccgctgt

SEQ ID NO: 8238 - RNA, 21 nt, synthetic construct
  misc_feature 1..21: note = Synthetic
  source 1..21: mol_type = other RNA
gggtgatgccattgggccact

SEQ ID NO: 8239 - RNA, 21 nt, synthetic construct
  misc_feature 1..21: note = Synthetic
  source 1..21: mol_type = other RNA
gggtgcaggccacgtgtcctc

SEQ ID NO: 8240 - RNA, 21 nt, synthetic construct
  misc_feature 1..21: note = Synthetic
  source 1..21: mol_type = other RNA
gggtgctgcagatcattctct

SEQ ID NO: 8241 - RNA, 21 nt, synthetic construct
  misc_feature 1..21: note = Synthetic
  source 1..21: mol_type = other RNA
gggtggccactgcagcctcag

SEQ ID NO: 8242 - RNA, 21 nt, synthetic construct
  misc_feature 1..21: note = Synthetic
  source 1..21: mol_type = other RNA
gggtggccccaggcagccggg

SEQ ID NO: 8243 - RNA, 21 nt, synthetic construct
  misc_feature 1..21: note = Synthetic
  source 1..21: mol_type = other RNA
gggtggccgggggcccctctg

SEQ ID NO: 8244 - RNA, 21 nt, synthetic construct
  misc_feature 1..21: note = Synthetic
  source 1..21: mol_type = other RNA
gggtgggccagcctcttttca

SEQ ID NO: 8245 - RNA, 21 nt, synthetic construct
  misc_feature 1..21: note = Synthetic
  source 1..21: mol_type = other RNA
gggtgggtcatgattcggggg

SEQ ID NO: 8246 - RNA, 21 nt, synthetic construct
  misc_feature 1..21: note = Synthetic
  source 1..21: mol_type = other RNA
gggtggtcctctcacaccagt

SEQ ID NO: 8247 - RNA, 21 nt, synthetic construct
  misc_feature 1..21: note = Synthetic
  source 1..21: mol_type = other RNA
gggtggttgtgtgctgtgtcc

SEQ ID NO: 8248 - RNA, 21 nt, synthetic construct
  misc_feature 1..21: note = Synthetic
  source 1..21: mol_type = other RNA
gggtgtctcaggcacttaata

SEQ ID NO: 8249 - RNA, 21 nt, synthetic construct
  misc_feature 1..21: note = Synthetic
  source 1..21: mol_type = other RNA
gggttcacaccattctcctgc

SEQ ID NO: 8250 - RNA, 21 nt, synthetic construct
  misc_feature 1..21: note = Synthetic
  source 1..21: mol_type = other RNA
gggttcatctgaccagtcccg

SEQ ID NO: 8251 - RNA, 21 nt, synthetic construct
  misc_feature 1..21: note = Synthetic
  source 1..21: mol_type = other RNA
gggttctgggcagggacggga

SEQ ID NO: 8252 - RNA, 21 nt, synthetic construct
  misc_feature 1..21: note = Synthetic
  source 1..21: mol_type = other RNA
gggttgatctgcggggcaggg

SEQ ID NO: 8253 - RNA, 21 nt, synthetic construct
  misc_feature 1..21: note = Synthetic
  source 1..21: mol_type = other RNA
gggttgtcaaagttgatgctg

SEQ ID NO: 8254 - RNA, 21 nt, synthetic construct
  misc_feature 1..21: note = Synthetic
  source 1..21: mol_type = other RNA
gggtttcacgtgttagccagg

SEQ ID NO: 8255 - RNA, 21 nt, synthetic construct
  misc_feature 1..21: note = Synthetic
  source 1..21: mol_type = other RNA
gggtttgcaaaaataaataga

SEQ ID NO: 8256 - RNA, 21 nt, synthetic construct
  misc_feature 1..21: note = Synthetic
  source 1..21: mol_type = other RNA
gggtttggcttagagattggt

SEQ ID NO: 8257 - RNA, 21 nt, synthetic construct
  misc_feature 1..21: note = Synthetic
  source 1..21: mol_type = other RNA
ggtaaacacgttgactcctga

SEQ ID NO: 8258 - RNA, 21 nt, synthetic construct
  misc_feature 1..21: note = Synthetic
  source 1..21: mol_type = other RNA
ggtaaacttgggcgagtgggg

SEQ ID NO: 8259 - RNA, 21 nt, synthetic construct
  misc_feature 1..21: note = Synthetic
  source 1..21: mol_type = other RNA
ggtaaccgggtgtctcaggca

SEQ ID NO: 8260 - RNA, 21 nt, synthetic construct
  misc_feature 1..21: note = Synthetic
  source 1..21: mol_type = other RNA
ggtacaaacccacctcgaaag

SEQ ID NO: 8261 - RNA, 21 nt, synthetic construct
  misc_feature 1..21: note = Synthetic
  source 1..21: mol_type = other RNA
ggtagctgtagccgtcctggt

SEQ ID NO: 8262 - RNA, 21 nt, synthetic construct
  misc_feature 1..21: note = Synthetic
  source 1..21: mol_type = other RNA
ggtaggcgatggagcccacag

SEQ ID NO: 8263 - RNA, 21 nt, synthetic construct
  misc_feature 1..21: note = Synthetic
  source 1..21: mol_type = other RNA
ggtaggggtcgggaggatggg

SEQ ID NO: 8264 - RNA, 21 nt, synthetic construct
  misc_feature 1..21: note = Synthetic
  source 1..21: mol_type = other RNA
ggtatccgcaacagagacagt

SEQ ID NO: 8265 - RNA, 21 nt, synthetic construct
  misc_feature 1..21: note = Synthetic
  source 1..21: mol_type = other RNA
ggtcaacctgcccctctctgt

SEQ ID NO: 8266 - RNA, 21 nt, synthetic construct
  misc_feature 1..21: note = Synthetic
  source 1..21: mol_type = other RNA
ggtcacactgccggctgccat

SEQ ID NO: 8267 - RNA, 21 nt, synthetic construct
  misc_feature 1..21: note = Synthetic
  source 1..21: mol_type = other RNA
ggtcagaccagtagattctat

SEQ ID NO: 8268 - RNA, 21 nt, synthetic construct
  misc_feature 1..21: note = Synthetic
  source 1..21: mol_type = other RNA
ggtcatgattcgggggtgaca

SEQ ID NO: 8269 - RNA, 21 nt, synthetic construct
  misc_feature 1..21: note = Synthetic
  source 1..21: mol_type = other RNA
ggtcattgcagacgtgggaac

SEQ ID NO: 8270 - RNA, 21 nt, synthetic construct
  misc_feature 1..21: note = Synthetic
  source 1..21: mol_type = other RNA
ggtccagcgcaatttccagcc

SEQ ID NO: 8271 - RNA, 21 nt, synthetic construct
  misc_feature 1..21: note = Synthetic
  source 1..21: mol_type = other RNA
ggtccagcgtcatcttcctga

SEQ ID NO: 8272 - RNA, 21 nt, synthetic construct
  misc_feature 1..21: note = Synthetic
  source 1..21: mol_type = other RNA
ggtccagctggaagccttcct

SEQ ID NO: 8273 - RNA, 21 nt, synthetic construct
  misc_feature 1..21: note = Synthetic
  source 1..21: mol_type = other RNA
ggtccagtagatgttgctgtg

SEQ ID NO: 8274 - RNA, 21 nt, synthetic construct
  misc_feature 1..21: note = Synthetic
  source 1..21: mol_type = other RNA
ggtccccccgggcctgtttct

SEQ ID NO: 8275 - RNA, 21 nt, synthetic construct
  misc_feature 1..21: note = Synthetic
  source 1..21: mol_type = other RNA
ggtcccgcactctttgatggg

SEQ ID NO: 8276 - RNA, 21 nt, synthetic construct
  misc_feature 1..21: note = Synthetic
  source 1..21: mol_type = other RNA
ggtcccgttggtgccatctgc

SEQ ID NO: 8277 - RNA, 21 nt, synthetic construct
  misc_feature 1..21: note = Synthetic
  source 1..21: mol_type = other RNA
ggtccctcgcagagtgtcaca

SEQ ID NO: 8278 - RNA, 21 nt, synthetic construct
  misc_feature 1..21: note = Synthetic
  source 1..21: mol_type = other RNA
ggtccctcgcagagtgtcaga

SEQ ID NO: 8279 - RNA, 21 nt, synthetic construct
  misc_feature 1..21: note = Synthetic
  source 1..21: mol_type = other RNA
ggtcctctcacaccagttcac

SEQ ID NO: 8280 - RNA, 21 nt, synthetic construct
  misc_feature 1..21: note = Synthetic
  source 1..21: mol_type = other RNA
ggtcgggaggatgggcaccag

SEQ ID NO: 8281 - RNA, 21 nt, synthetic construct
  misc_feature 1..21: note = Synthetic
  source 1..21: mol_type = other RNA
ggtcgggtggttgtgtgctgt

SEQ ID NO: 8282 - RNA, 21 nt, synthetic construct
  misc_feature 1..21: note = Synthetic
  source 1..21: mol_type = other RNA
ggtcgttgtcgcaggcccaca

SEQ ID NO: 8283 - RNA, 21 nt, synthetic construct
  misc_feature 1..21: note = Synthetic
  source 1..21: mol_type = other RNA
ggtctcaggaagggttctggg

SEQ ID NO: 8284 - RNA, 21 nt, synthetic construct
  misc_feature 1..21: note = Synthetic
  source 1..21: mol_type = other RNA
ggtctccaactcctgaactca

SEQ ID NO: 8285 - RNA, 21 nt, synthetic construct
  misc_feature 1..21: note = Synthetic
  source 1..21: mol_type = other RNA
ggtctcgatctcctgacctca

SEQ ID NO: 8286 - RNA, 21 nt, synthetic construct
  misc_feature 1..21: note = Synthetic
  source 1..21: mol_type = other RNA
ggtctcggtgccaccacggat

SEQ ID NO: 8287 - RNA, 21 nt, synthetic construct
  misc_feature 1..21: note = Synthetic
  source 1..21: mol_type = other RNA
ggtctgagtcacagacgaact

SEQ ID NO: 8288 - RNA, 21 nt, synthetic construct
  misc_feature 1..21: note = Synthetic
  source 1..21: mol_type = other RNA
ggtcttactatgttgcccagg

SEQ ID NO: 8289 - RNA, 21 nt, synthetic construct
  misc_feature 1..21: note = Synthetic
  source 1..21: mol_type = other RNA
ggtcttcatctgttgcccagg

SEQ ID NO: 8290 - RNA, 21 nt, synthetic construct
  misc_feature 1..21: note = Synthetic
  source 1..21: mol_type = other RNA
ggtcttccggttgcccccgtt

SEQ ID NO: 8291 - RNA, 21 nt, synthetic construct
  misc_feature 1..21: note = Synthetic
  source 1..21: mol_type = other RNA
ggtcttctctgtctttgaata

SEQ ID NO: 8292 - RNA, 21 nt, synthetic construct
  misc_feature 1..21: note = Synthetic
  source 1..21: mol_type = other RNA
ggtcttctgatagacggggtt

SEQ ID NO: 8293 - RNA, 21 nt, synthetic construct
  misc_feature 1..21: note = Synthetic
  source 1..21: mol_type = other RNA
ggtgaagaagaggtaggcgat

SEQ ID NO: 8294 - RNA, 21 nt, synthetic construct
  misc_feature 1..21: note = Synthetic
  source 1..21: mol_type = other RNA
ggtgaatgagtttggtctcgg

SEQ ID NO: 8295 - RNA, 21 nt, synthetic construct
  misc_feature 1..21: note = Synthetic
  source 1..21: mol_type = other RNA
ggtgacagacaagcacgtctc

SEQ ID NO: 8296 - RNA, 21 nt, synthetic construct
  misc_feature 1..21: note = Synthetic
  source 1..21: mol_type = other RNA
ggtgacagggcaaaggctaac

SEQ ID NO: 8297 - RNA, 21 nt, synthetic construct
  misc_feature 1..21: note = Synthetic
  source 1..21: mol_type = other RNA
ggtgaccagtgactcaggctc

SEQ ID NO: 8298 - RNA, 21 nt, synthetic construct
  misc_feature 1..21: note = Synthetic
  source 1..21: mol_type = other RNA
ggtgagacattgtcactatct

SEQ ID NO: 8299 - RNA, 21 nt, synthetic construct
  misc_feature 1..21: note = Synthetic
  source 1..21: mol_type = other RNA
ggtgagcaccgggcaggaggc

SEQ ID NO: 8300 - RNA, 21 nt, synthetic construct
  misc_feature 1..21: note = Synthetic
  source 1..21: mol_type = other RNA
ggtgagcccaggggtggcccc

SEQ ID NO: 8301 - RNA, 21 nt, synthetic construct
  misc_feature 1..21: note = Synthetic
  source 1..21: mol_type = other RNA
ggtgaggttgtggaagagaac

SEQ ID NO: 8302 - RNA, 21 nt, synthetic construct
  misc_feature 1..21: note = Synthetic
  source 1..21: mol_type = other RNA
ggtgatgcattcgccgctgtg

SEQ ID NO: 8303 - RNA, 21 nt, synthetic construct
  misc_feature 1..21: note = Synthetic
  source 1..21: mol_type = other RNA
ggtgatgccattgggccactg

SEQ ID NO: 8304 - RNA, 21 nt, synthetic construct
  misc_feature 1..21: note = Synthetic
  source 1..21: mol_type = other RNA
ggtgcaggccacgtgtcctca

SEQ ID NO: 8305 - RNA, 21 nt, synthetic construct
  misc_feature 1..21: note = Synthetic
  source 1..21: mol_type = other RNA
ggtgccaccacggattcagcc

SEQ ID NO: 8306 - RNA, 21 nt, synthetic construct
  misc_feature 1..21: note = Synthetic
  source 1..21: mol_type = other RNA
ggtgccatctgctgttgtgtg

SEQ ID NO: 8307 - RNA, 21 nt, synthetic construct
  misc_feature 1..21: note = Synthetic
  source 1..21: mol_type = other RNA
ggtgcccgccaccacgcccgg

SEQ ID NO: 8308 - RNA, 21 nt, synthetic construct
  misc_feature 1..21: note = Synthetic
  source 1..21: mol_type = other RNA
ggtgctgcagatcattctctg

SEQ ID NO: 8309 - RNA, 21 nt, synthetic construct
  misc_feature 1..21: note = Synthetic
  source 1..21: mol_type = other RNA
ggtggagagaaactcaaaact

SEQ ID NO: 8310 - RNA, 21 nt, synthetic construct
  misc_feature 1..21: note = Synthetic
  source 1..21: mol_type = other RNA
ggtggagctgttgcactggaa

SEQ ID NO: 8311 - RNA, 21 nt, synthetic construct
  misc_feature 1..21: note = Synthetic
  source 1..21: mol_type = other RNA
ggtggatgaggcagggccagg

SEQ ID NO: 8312 - RNA, 21 nt, synthetic construct
  misc_feature 1..21: note = Synthetic
  source 1..21: mol_type = other RNA
ggtggatgtctcctgggtggc

SEQ ID NO: 8313 - RNA, 21 nt, synthetic construct
  misc_feature 1..21: note = Synthetic
  source 1..21: mol_type = other RNA
ggtggccacagcgcagttttc

SEQ ID NO: 8314 - RNA, 21 nt, synthetic construct
  misc_feature 1..21: note = Synthetic
  source 1..21: mol_type = other RNA
ggtggccacaggacagccttg

SEQ ID NO: 8315 - RNA, 21 nt, synthetic construct
  misc_feature 1..21: note = Synthetic
  source 1..21: mol_type = other RNA
ggtggccactgcagcctcagc

SEQ ID NO: 8316 - RNA, 21 nt, synthetic construct
  misc_feature 1..21: note = Synthetic
  source 1..21: mol_type = other RNA
ggtggccccaggcagccggga

SEQ ID NO: 8317 - RNA, 21 nt, synthetic construct
  misc_feature 1..21: note = Synthetic
  source 1..21: mol_type = other RNA
ggtggccgggggcccctctgt

SEQ ID NO: 8318 - RNA, 21 nt, synthetic construct
  misc_feature 1..21: note = Synthetic
  source 1..21: mol_type = other RNA
ggtgggccagcctcttttcat

SEQ ID NO: 8319 - RNA, 21 nt, synthetic construct
  misc_feature 1..21: note = Synthetic
  source 1..21: mol_type = other RNA
ggtgggcggacataaagacga

SEQ ID NO: 8320 - RNA, 21 nt, synthetic construct
  misc_feature 1..21: note = Synthetic
  source 1..21: mol_type = other RNA
ggtggggacggaggtgtcgcc

SEQ ID NO: 8321 - RNA, 21 nt, synthetic construct
  misc_feature 1..21: note = Synthetic
  source 1..21: mol_type = other RNA
ggtggggcgagggcgcccccc

SEQ ID NO: 8322 - RNA, 21 nt, synthetic construct
  misc_feature 1..21: note = Synthetic
  source 1..21: mol_type = other RNA
ggtgggtcatgattcgggggt

SEQ ID NO: 8323 - RNA, 21 nt, synthetic construct
  misc_feature 1..21: note = Synthetic
  source 1..21: mol_type = other RNA
ggtggtcctctcacaccagtt

SEQ ID NO: 8324 - RNA, 21 nt, synthetic construct
  misc_feature 1..21: note = Synthetic
  source 1..21: mol_type = other RNA
ggtggttgtgtgctgtgtcct

SEQ ID NO: 8325 - RNA, 21 nt, synthetic construct
  misc_feature 1..21: note = Synthetic
  source 1..21: mol_type = other RNA
ggtgtactcgctccggtccag

SEQ ID NO: 8326 - RNA, 21 nt, synthetic construct
  misc_feature 1..21: note = Synthetic
  source 1..21: mol_type = other RNA
ggtgtcataggaagagacgcc

SEQ ID NO: 8327 - RNA, 21 nt, synthetic construct
  misc_feature 1..21: note = Synthetic
  source 1..21: mol_type = other RNA
ggtgtcatcctggtccccccg

SEQ ID NO: 8328 - RNA, 21 nt, synthetic construct
  misc_feature 1..21: note = Synthetic
  source 1..21: mol_type = other RNA
ggtgtcctgacagccacacct

SEQ ID NO: 8329 - RNA, 21 nt, synthetic construct
  misc_feature 1..21: note = Synthetic
  source 1..21: mol_type = other RNA
ggtgtcgccacagagcacagc

SEQ ID NO: 8330 - RNA, 21 nt, synthetic construct
  misc_feature 1..21: note = Synthetic
  source 1..21: mol_type = other RNA
ggtgtcgggaacaggtcgggt

SEQ ID NO: 8331 - RNA, 21 nt, synthetic construct
  misc_feature 1..21: note = Synthetic
  source 1..21: mol_type = other RNA
ggtgtcgggatcctgacactc

SEQ ID NO: 8332 - RNA, 21 nt, synthetic construct
  misc_feature 1..21: note = Synthetic
  source 1..21: mol_type = other RNA
ggtgtctcaggcacttaataa

SEQ ID NO: 8333 - RNA, 21 nt, synthetic construct
  misc_feature 1..21: note = Synthetic
  source 1..21: mol_type = other RNA
ggttcacaccattctcctgcc

SEQ ID NO: 8334 - RNA, 21 nt, synthetic construct
  misc_feature 1..21: note = Synthetic
  source 1..21: mol_type = other RNA
ggttcacgcagagctggctgc

SEQ ID NO: 8335 - RNA, 21 nt, synthetic construct
  misc_feature 1..21: note = Synthetic
  source 1..21: mol_type = other RNA
ggttcatctgaccagtcccgg

SEQ ID NO: 8336 - RNA, 21 nt, synthetic construct
  misc_feature 1..21: note = Synthetic
  source 1..21: mol_type = other RNA
ggttcatttaagaaatttaat

SEQ ID NO: 8337 - RNA, 21 nt, synthetic construct
  misc_feature 1..21: note = Synthetic
  source 1..21: mol_type = other RNA
ggttccctgcactggggggga

SEQ ID NO: 8338 - RNA, 21 nt, synthetic construct
  misc_feature 1..21: note = Synthetic
  source 1..21: mol_type = other RNA
ggttctgggcagggacgggac

SEQ ID NO: 8339 - RNA, 21 nt, synthetic construct
  misc_feature 1..21: note = Synthetic
  source 1..21: mol_type = other RNA
ggttgacacggcccccacagc

SEQ ID NO: 8340 - RNA, 21 nt, synthetic construct
  misc_feature 1..21: note = Synthetic
  source 1..21: mol_type = other RNA
ggttgatctgcggggcaggga

SEQ ID NO: 8341 - RNA, 21 nt, synthetic construct
  misc_feature 1..21: note = Synthetic
  source 1..21: mol_type = other RNA
ggttgcccccgttgacatcga

SEQ ID NO: 8342 - RNA, 21 nt, synthetic construct
  misc_feature 1..21: note = Synthetic
  source 1..21: mol_type = other RNA
ggttggcactgaaaatggctt

SEQ ID NO: 8343 - RNA, 21 nt, synthetic construct
  misc_feature 1..21: note = Synthetic
  source 1..21: mol_type = other RNA
ggttggggatgaggctggtgt

SEQ ID NO: 8344 - RNA, 21 nt, synthetic construct
  misc_feature 1..21: note = Synthetic
  source 1..21: mol_type = other RNA
ggttggtgaagaagaggtagg

SEQ ID NO: 8345 - RNA, 21 nt, synthetic construct
  misc_feature 1..21: note = Synthetic
  source 1..21: mol_type = other RNA
ggttgtcaaagttgatgctgt

SEQ ID NO: 8346 - RNA, 21 nt, synthetic construct
  misc_feature 1..21: note = Synthetic
  source 1..21: mol_type = other RNA
ggttgtggaagagaaccatat

SEQ ID NO: 8347 - RNA, 21 nt, synthetic construct
  misc_feature 1..21: note = Synthetic
  source 1..21: mol_type = other RNA
ggttgtggcaaatgtggacct

SEQ ID NO: 8348 - RNA, 21 nt, synthetic construct
  misc_feature 1..21: note = Synthetic
  source 1..21: mol_type = other RNA
ggttgtgtgctgtgtccttac

SEQ ID NO: 8349 - RNA, 21 nt, synthetic construct
  misc_feature 1..21: note = Synthetic
  source 1..21: mol_type = other RNA
ggtttaaaaagtgacacccat

SEQ ID NO: 8350 - RNA, 21 nt, synthetic construct
  misc_feature 1..21: note = Synthetic
  source 1..21: mol_type = other RNA
ggtttcacgtgttagccagga

SEQ ID NO: 8351 - RNA, 21 nt, synthetic construct
  misc_feature 1..21: note = Synthetic
  source 1..21: mol_type = other RNA
ggtttgcaaaaataaatagat

SEQ ID NO: 8352 - RNA, 21 nt, synthetic construct
  misc_feature 1..21: note = Synthetic
  source 1..21: mol_type = other RNA
ggtttggcttagagattggtg

SEQ ID NO: 8353 - RNA, 21 nt, synthetic construct
  misc_feature 1..21: note = Synthetic
  source 1..21: mol_type = other RNA
ggttttcagccaacaagttga

SEQ ID NO: 8354 - RNA, 21 nt, synthetic construct
  misc_feature 1..21: note = Synthetic
  source 1..21: mol_type = other RNA
ggtttttgtagagatgggatc

SEQ ID NO: 8355 - RNA, 21 nt, synthetic construct
  misc_feature 1..21: note = Synthetic
  source 1..21: mol_type = other RNA
ggtttttttttgttttttttt

SEQ ID NO: 8356 - RNA, 21 nt, synthetic construct
  misc_feature 1..21: note = Synthetic
  source 1..21: mol_type = other RNA
gtaaacacgttgactcctgag

SEQ ID NO: 8357 - RNA, 21 nt, synthetic construct
  misc_feature 1..21: note = Synthetic
  source 1..21: mol_type = other RNA
gtaaacttgggcgagtggggg

SEQ ID NO: 8358 - RNA, 21 nt, synthetic construct
  misc_feature 1..21: note = Synthetic
  source 1..21: mol_type = other RNA
gtaaagacccctacagcgctg

SEQ ID NO: 8359 - RNA, 21 nt, synthetic construct
  misc_feature 1..21: note = Synthetic
  source 1..21: mol_type = other RNA
gtaacacggcgatttcagaaa

SEQ ID NO: 8360 - RNA, 21 nt, synthetic construct
  misc_feature 1..21: note = Synthetic
  source 1..21: mol_type = other RNA
gtaaccgggtgtctcaggcac

SEQ ID NO: 8361 - RNA, 21 nt, synthetic construct
  misc_feature 1..21: note = Synthetic
  source 1..21: mol_type = other RNA
gtaagacattcaggctacaaa

SEQ ID NO: 8362 - RNA, 21 nt, synthetic construct
  misc_feature 1..21: note = Synthetic
  source 1..21: mol_type = other RNA
gtaaggaaccgaggccttgag

SEQ ID NO: 8363 - RNA, 21 nt, synthetic construct
  misc_feature 1..21: note = Synthetic
  source 1..21: mol_type = other RNA
gtacaaacccacctcgaaaga

SEQ ID NO: 8364 - RNA, 21 nt, synthetic construct
  misc_feature 1..21: note = Synthetic
  source 1..21: mol_type = other RNA
gtacaactctgaactgagaaa

SEQ ID NO: 8365 - RNA, 21 nt, synthetic construct
  misc_feature 1..21: note = Synthetic
  source 1..21: mol_type = other RNA
gtacacagtgtacaactctga

SEQ ID NO: 8366 - RNA, 21 nt, synthetic construct
  misc_feature 1..21: note = Synthetic
  source 1..21: mol_type = other RNA
gtacagggacgcatttacgtg

SEQ ID NO: 8367 - RNA, 21 nt, synthetic construct
  misc_feature 1..21: note = Synthetic
  source 1..21: mol_type = other RNA
gtacataaagaagaggcattt

SEQ ID NO: 8368 - RNA, 21 nt, synthetic construct
  misc_feature 1..21: note = Synthetic
  source 1..21: mol_type = other RNA
gtacatgaagccatgaacagg

SEQ ID NO: 8369 - RNA, 21 nt, synthetic construct
  misc_feature 1..21: note = Synthetic
  source 1..21: mol_type = other RNA
gtacccagctgatttttaact

SEQ ID NO: 8370 - RNA, 21 nt, synthetic construct
  misc_feature 1..21: note = Synthetic
  source 1..21: mol_type = other RNA
gtactcgctccggtccagcgt

SEQ ID NO: 8371 - RNA, 21 nt, synthetic construct
  misc_feature 1..21: note = Synthetic
  source 1..21: mol_type = other RNA
gtagagacggggtttcacgtg

SEQ ID NO: 8372 - RNA, 21 nt, synthetic construct
  misc_feature 1..21: note = Synthetic
  source 1..21: mol_type = other RNA
gtagagatgggatctcgcttt

SEQ ID NO: 8373 - RNA, 21 nt, synthetic construct
  misc_feature 1..21: note = Synthetic
  source 1..21: mol_type = other RNA
gtagaggcggccactgaggag

SEQ ID NO: 8374 - RNA, 21 nt, synthetic construct
  misc_feature 1..21: note = Synthetic
  source 1..21: mol_type = other RNA
gtagatgtccacaccattcag

SEQ ID NO: 8375 - RNA, 21 nt, synthetic construct
  misc_feature 1..21: note = Synthetic
  source 1..21: mol_type = other RNA
gtagatgttgctgtggatcca

SEQ ID NO: 8376 - RNA, 21 nt, synthetic construct
  misc_feature 1..21: note = Synthetic
  source 1..21: mol_type = other RNA
gtagattctattgctggccac

SEQ ID NO: 8377 - RNA, 21 nt, synthetic construct
  misc_feature 1..21: note = Synthetic
  source 1..21: mol_type = other RNA
gtagccaccctccaggttcac

SEQ ID NO: 8378 - RNA, 21 nt, synthetic construct
  misc_feature 1..21: note = Synthetic
  source 1..21: mol_type = other RNA
gtagccgatcttaaggtcatt

SEQ ID NO: 8379 - RNA, 21 nt, synthetic construct
  misc_feature 1..21: note = Synthetic
  source 1..21: mol_type = other RNA
gtagccgtcctggttgtggca

SEQ ID NO: 8380 - RNA, 21 nt, synthetic construct
  misc_feature 1..21: note = Synthetic
  source 1..21: mol_type = other RNA
gtagctgggactacaggtgcc

SEQ ID NO: 8381 - RNA, 21 nt, synthetic construct
  misc_feature 1..21: note = Synthetic
  source 1..21: mol_type = other RNA
gtagctgggatcacaggcacg

SEQ ID NO: 8382 - RNA, 21 nt, synthetic construct
  misc_feature 1..21: note = Synthetic
  source 1..21: mol_type = other RNA
gtagctgtagccgtcctggtt

SEQ ID NO: 8383 - RNA, 21 nt, synthetic construct
  misc_feature 1..21: note = Synthetic
  source 1..21: mol_type = other RNA
gtaggagatgcatttcccgtc

SEQ ID NO: 8384 - RNA, 21 nt, synthetic construct
  misc_feature 1..21: note = Synthetic
  source 1..21: mol_type = other RNA
gtaggcgatggagcccacagc

SEQ ID NO: 8385 - RNA, 21 nt, synthetic construct
  misc_feature 1..21: note = Synthetic
  source 1..21: mol_type = other RNA
gtagggagaggcacgctctgt

SEQ ID NO: 8386 - RNA, 21 nt, synthetic construct
  misc_feature 1..21: note = Synthetic
  source 1..21: mol_type = other RNA
gtaggggtcgggaggatgggc

SEQ ID NO: 8387 - RNA, 21 nt, synthetic construct
  misc_feature 1..21: note = Synthetic
  source 1..21: mol_type = other RNA
gtaggttttcagccaacaagt

SEQ ID NO: 8388 - RNA, 21 nt, synthetic construct
  misc_feature 1..21: note = Synthetic
  source 1..21: mol_type = other RNA
gtatatatatatatataagtg

SEQ ID NO: 8389 - RNA, 21 nt, synthetic construct
  misc_feature 1..21: note = Synthetic
  source 1..21: mol_type = other RNA
gtatccgcaacagagacagtg

SEQ ID NO: 8390 - RNA, 21 nt, synthetic construct
  misc_feature 1..21: note = Synthetic
  source 1..21: mol_type = other RNA
gtatgtcgcggaggcggctcc

SEQ ID NO: 8391 - RNA, 21 nt, synthetic construct
  misc_feature 1..21: note = Synthetic
  source 1..21: mol_type = other RNA
gtatttctgaaatagggtctt

SEQ ID NO: 8392 - RNA, 21 nt, synthetic construct
  misc_feature 1..21: note = Synthetic
  source 1..21: mol_type = other RNA
gtatttttagtagagacgggg

SEQ ID NO: 8393 - RNA, 21 nt, synthetic construct
  misc_feature 1..21: note = Synthetic
  source 1..21: mol_type = other RNA
gtcaaacgatccagactggag

SEQ ID NO: 8394 - RNA, 21 nt, synthetic construct
  misc_feature 1..21: note = Synthetic
  source 1..21: mol_type = other RNA
gtcaaagttgatgctgttgat

SEQ ID NO: 8395 - RNA, 21 nt, synthetic construct
  misc_feature 1..21: note = Synthetic
  source 1..21: mol_type = other RNA
gtcaacccagtagaggcggcc

SEQ ID NO: 8396 - RNA, 21 nt, synthetic construct
  misc_feature 1..21: note = Synthetic
  source 1..21: mol_type = other RNA
gtcaacctgcccctctctgtc

SEQ ID NO: 8397 - RNA, 21 nt, synthetic construct
  misc_feature 1..21: note = Synthetic
  source 1..21: mol_type = other RNA
gtcaagctgggtgctgcagat

SEQ ID NO: 8398 - RNA, 21 nt, synthetic construct
  misc_feature 1..21: note = Synthetic
  source 1..21: mol_type = other RNA
gtcacacagctgcccccgaga

SEQ ID NO: 8399 - RNA, 21 nt, synthetic construct
  misc_feature 1..21: note = Synthetic
  source 1..21: mol_type = other RNA
gtcacactgccggctgccatg

SEQ ID NO: 8400 - RNA, 21 nt, synthetic construct
  misc_feature 1..21: note = Synthetic
  source 1..21: mol_type = other RNA
gtcacagacgaactgccgaga

SEQ ID NO: 8401 - RNA, 21 nt, synthetic construct
  misc_feature 1..21: note = Synthetic
  source 1..21: mol_type = other RNA
gtcacattaacgcagccaact

SEQ ID NO: 8402 - RNA, 21 nt, synthetic construct
  misc_feature 1..21: note = Synthetic
  source 1..21: mol_type = other RNA
gtcaccagcgagtagatgtcc

SEQ ID NO: 8403 - RNA, 21 nt, synthetic construct
  misc_feature 1..21: note = Synthetic
  source 1..21: mol_type = other RNA
gtcacggtggagagaaactca

SEQ ID NO: 8404 - RNA, 21 nt, synthetic construct
  misc_feature 1..21: note = Synthetic
  source 1..21: mol_type = other RNA
gtcactatctccaccgtggtg

SEQ ID NO: 8405 - RNA, 21 nt, synthetic construct
  misc_feature 1..21: note = Synthetic
  source 1..21: mol_type = other RNA
gtcactgaacaaatacagcaa

SEQ ID NO: 8406 - RNA, 21 nt, synthetic construct
  misc_feature 1..21: note = Synthetic
  source 1..21: mol_type = other RNA
gtcactgtctctccggacatc

SEQ ID NO: 8407 - RNA, 21 nt, synthetic construct
  misc_feature 1..21: note = Synthetic
  source 1..21: mol_type = other RNA
gtcagacagccttgctcgtct

SEQ ID NO: 8408 - RNA, 21 nt, synthetic construct
  misc_feature 1..21: note = Synthetic
  source 1..21: mol_type = other RNA
gtcagaccagtagattctatt

SEQ ID NO: 8409 - RNA, 21 nt, synthetic construct
  misc_feature 1..21: note = Synthetic
  source 1..21: mol_type = other RNA
gtcagatttgtccttgcagtc

SEQ ID NO: 8410 - RNA, 21 nt, synthetic construct
  misc_feature 1..21: note = Synthetic
  source 1..21: mol_type = other RNA
gtcagggcgacaggtggccac

SEQ ID NO: 8411 - RNA, 21 nt, synthetic construct
  misc_feature 1..21: note = Synthetic
  source 1..21: mol_type = other RNA
gtcagtccagtacatgaagcc

SEQ ID NO: 8412 - RNA, 21 nt, synthetic construct
  misc_feature 1..21: note = Synthetic
  source 1..21: mol_type = other RNA
gtcataggaagagacgccgtg

SEQ ID NO: 8413 - RNA, 21 nt, synthetic construct
  misc_feature 1..21: note = Synthetic
  source 1..21: mol_type = other RNA
gtcatattcccggtcacactg

SEQ ID NO: 8414 - RNA, 21 nt, synthetic construct
  misc_feature 1..21: note = Synthetic
  source 1..21: mol_type = other RNA
gtcatcctccagactgaccat

SEQ ID NO: 8415 - RNA, 21 nt, synthetic construct
  misc_feature 1..21: note = Synthetic
  source 1..21: mol_type = other RNA
gtcatcctggtccccccgggc

SEQ ID NO: 8416 - RNA, 21 nt, synthetic construct
  misc_feature 1..21: note = Synthetic
  source 1..21: mol_type = other RNA
gtcatcttcctgacctcgtgc

SEQ ID NO: 8417 - RNA, 21 nt, synthetic construct
  misc_feature 1..21: note = Synthetic
  source 1..21: mol_type = other RNA
gtcatgattcgggggtgacag

SEQ ID NO: 8418 - RNA, 21 nt, synthetic construct
  misc_feature 1..21: note = Synthetic
  source 1..21: mol_type = other RNA
gtcattgcagacgtgggaaca

SEQ ID NO: 8419 - RNA, 21 nt, synthetic construct
  misc_feature 1..21: note = Synthetic
  source 1..21: mol_type = other RNA
gtccaaaatactttgtcctca

SEQ ID NO: 8420 - RNA, 21 nt, synthetic construct
  misc_feature 1..21: note = Synthetic
  source 1..21: mol_type = other RNA
gtccaagcagtcccggtctga

SEQ ID NO: 8421 - RNA, 21 nt, synthetic construct
  misc_feature 1..21: note = Synthetic
  source 1..21: mol_type = other RNA
gtccaagcattcgttggtccc

SEQ ID NO: 8422 - RNA, 21 nt, synthetic construct
  misc_feature 1..21: note = Synthetic
  source 1..21: mol_type = other RNA
gtccacaccattcaggccccc

SEQ ID NO: 8423 - RNA, 21 nt, synthetic construct
  misc_feature 1..21: note = Synthetic
  source 1..21: mol_type = other RNA
gtccacagccagcccgtcggg

SEQ ID NO: 8424 - RNA, 21 nt, synthetic construct
  misc_feature 1..21: note = Synthetic
  source 1..21: mol_type = other RNA
gtccacttggccatcgcacct

SEQ ID NO: 8425 - RNA, 21 nt, synthetic construct
  misc_feature 1..21: note = Synthetic
  source 1..21: mol_type = other RNA
gtccagagcgaccacgttcct

SEQ ID NO: 8426 - RNA, 21 nt, synthetic construct
  misc_feature 1..21: note = Synthetic
  source 1..21: mol_type = other RNA
gtccagcgcaatttccagccc

SEQ ID NO: 8427 - RNA, 21 nt, synthetic construct
  misc_feature 1..21: note = Synthetic
  source 1..21: mol_type = other RNA
gtccagcgtcatcttcctgac

SEQ ID NO: 8428 - RNA, 21 nt, synthetic construct
  misc_feature 1..21: note = Synthetic
  source 1..21: mol_type = other RNA
gtccagctggaagccttcctc

SEQ ID NO: 8429 - RNA, 21 nt, synthetic construct
  misc_feature 1..21: note = Synthetic
  source 1..21: mol_type = other RNA
gtccagggtgatgcattcgcc

SEQ ID NO: 8430 - RNA, 21 nt, synthetic construct
  misc_feature 1..21: note = Synthetic
  source 1..21: mol_type = other RNA
gtccagtacatgaagccatga

SEQ ID NO: 8431 - RNA, 21 nt, synthetic construct
  misc_feature 1..21: note = Synthetic
  source 1..21: mol_type = other RNA
gtccagtagatgttgctgtgg

SEQ ID NO: 8432 - RNA, 21 nt, synthetic construct
  misc_feature 1..21: note = Synthetic
  source 1..21: mol_type = other RNA
gtccagttcgtgcaaataatc

SEQ ID NO: 8433 - RNA, 21 nt, synthetic construct
  misc_feature 1..21: note = Synthetic
  source 1..21: mol_type = other RNA
gtccccccgggcctgtttctc

SEQ ID NO: 8434 - RNA, 21 nt, synthetic construct
  misc_feature 1..21: note = Synthetic
  source 1..21: mol_type = other RNA
gtccccgccgcggcgaggagc

SEQ ID NO: 8435 - RNA, 21 nt, synthetic construct
  misc_feature 1..21: note = Synthetic
  source 1..21: mol_type = other RNA
gtccccggatttgcaggtgac

SEQ ID NO: 8436 - RNA, 21 nt, synthetic construct
  misc_feature 1..21: note = Synthetic
  source 1..21: mol_type = other RNA
gtccccggcattcattgacac

SEQ ID NO: 8437 - RNA, 21 nt, synthetic construct
  misc_feature 1..21: note = Synthetic
  source 1..21: mol_type = other RNA
gtccccttggaacacgtaaag

SEQ ID NO: 8438 - RNA, 21 nt, synthetic construct
  misc_feature 1..21: note = Synthetic
  source 1..21: mol_type = other RNA
gtcccgacccggatcacgacc

SEQ ID NO: 8439 - RNA, 21 nt, synthetic construct
  misc_feature 1..21: note = Synthetic
  source 1..21: mol_type = other RNA
gtcccgcactctttgatgggt

SEQ ID NO: 8440 - RNA, 21 nt, synthetic construct
  misc_feature 1..21: note = Synthetic
  source 1..21: mol_type = other RNA
gtcccggcagtctctagccat

SEQ ID NO: 8441 - RNA, 21 nt, synthetic construct
  misc_feature 1..21: note = Synthetic
  source 1..21: mol_type = other RNA
gtcccggtcaacctgcccctc

SEQ ID NO: 8442 - RNA, 21 nt, synthetic construct
  misc_feature 1..21: note = Synthetic
  source 1..21: mol_type = other RNA
gtcccggtctgagtcacagac

SEQ ID NO: 8443 - RNA, 21 nt, synthetic construct
  misc_feature 1..21: note = Synthetic
  source 1..21: mol_type = other RNA
gtcccgtcaaacgatccagac

SEQ ID NO: 8444 - RNA, 21 nt, synthetic construct
  misc_feature 1..21: note = Synthetic
  source 1..21: mol_type = other RNA
gtcccgttggtgccatctgct

SEQ ID NO: 8445 - RNA, 21 nt, synthetic construct
  misc_feature 1..21: note = Synthetic
  source 1..21: mol_type = other RNA
gtccctcgcagagtgtcacat

SEQ ID NO: 8446 - RNA, 21 nt, synthetic construct
  misc_feature 1..21: note = Synthetic
  source 1..21: mol_type = other RNA
gtccctcgcagagtgtcagac

SEQ ID NO: 8447 - RNA, 21 nt, synthetic construct
  misc_feature 1..21: note = Synthetic
  source 1..21: mol_type = other RNA
gtccctggccagcagcatgcc

SEQ ID NO: 8448 - RNA, 21 nt, synthetic construct
  misc_feature 1..21: note = Synthetic
  source 1..21: mol_type = other RNA
gtccctggggacaattgccaa

SEQ ID NO: 8449 - RNA, 21 nt, synthetic construct
  misc_feature 1..21: note = Synthetic
  source 1..21: mol_type = other RNA
gtccgaagcctgttctgcctc

SEQ ID NO: 8450 - RNA, 21 nt, synthetic construct
  misc_feature 1..21: note = Synthetic
  source 1..21: mol_type = other RNA
gtccgggcaggcgcaggtaaa

SEQ ID NO: 8451 - RNA, 21 nt, synthetic construct
  misc_feature 1..21: note = Synthetic
  source 1..21: mol_type = other RNA
gtcctagctggaaaccctggc

SEQ ID NO: 8452 - RNA, 21 nt, synthetic construct
  misc_feature 1..21: note = Synthetic
  source 1..21: mol_type = other RNA
gtcctcaaagacggccaagga

SEQ ID NO: 8453 - RNA, 21 nt, synthetic construct
  misc_feature 1..21: note = Synthetic
  source 1..21: mol_type = other RNA
gtcctcacggccaaggtaacc

SEQ ID NO: 8454 - RNA, 21 nt, synthetic construct
  misc_feature 1..21: note = Synthetic
  source 1..21: mol_type = other RNA
gtcctctcacaccagttcact

SEQ ID NO: 8455 - RNA, 21 nt, synthetic construct
  misc_feature 1..21: note = Synthetic
  source 1..21: mol_type = other RNA
gtcctgacagccacacctggg

SEQ ID NO: 8456 - RNA, 21 nt, synthetic construct
  misc_feature 1..21: note = Synthetic
  source 1..21: mol_type = other RNA
gtcctgggagcacgtcttggg

SEQ ID NO: 8457 - RNA, 21 nt, synthetic construct
  misc_feature 1..21: note = Synthetic
  source 1..21: mol_type = other RNA
gtcctggttgtggcaaatgtg

SEQ ID NO: 8458 - RNA, 21 nt, synthetic construct
  misc_feature 1..21: note = Synthetic
  source 1..21: mol_type = other RNA
gtccttacggctgtggagctg

SEQ ID NO: 8459 - RNA, 21 nt, synthetic construct
  misc_feature 1..21: note = Synthetic
  source 1..21: mol_type = other RNA
gtccttgcagtcatattcccg

SEQ ID NO: 8460 - RNA, 21 nt, synthetic construct
  misc_feature 1..21: note = Synthetic
  source 1..21: mol_type = other RNA
gtccttgcagtcggggccacc

SEQ ID NO: 8461 - RNA, 21 nt, synthetic construct
  misc_feature 1..21: note = Synthetic
  source 1..21: mol_type = other RNA
gtcgcaggcccacagctgggg

SEQ ID NO: 8462 - RNA, 21 nt, synthetic construct
  misc_feature 1..21: note = Synthetic
  source 1..21: mol_type = other RNA
gtcgcagtccacttggccatc

SEQ ID NO: 8463 - RNA, 21 nt, synthetic construct
  misc_feature 1..21: note = Synthetic
  source 1..21: mol_type = other RNA
gtcgccacagagcacagcgga

SEQ ID NO: 8464 - RNA, 21 nt, synthetic construct
  misc_feature 1..21: note = Synthetic
  source 1..21: mol_type = other RNA
gtcgcccacgtggctgaagat

SEQ ID NO: 8465 - RNA, 21 nt, synthetic construct
  misc_feature 1..21: note = Synthetic
  source 1..21: mol_type = other RNA
gtcgcccactgcagtccccgc

SEQ ID NO: 8466 - RNA, 21 nt, synthetic construct
  misc_feature 1..21: note = Synthetic
  source 1..21: mol_type = other RNA
gtcgcccagagcttggtgaga

SEQ ID NO: 8467 - RNA, 21 nt, synthetic construct
  misc_feature 1..21: note = Synthetic
  source 1..21: mol_type = other RNA
gtcgcccaggccagactgcgg

SEQ ID NO: 8468 - RNA, 21 nt, synthetic construct
  misc_feature 1..21: note = Synthetic
  source 1..21: mol_type = other RNA
gtcgcctttgtgacaggaacc

SEQ ID NO: 8469 - RNA, 21 nt, synthetic construct
  misc_feature 1..21: note = Synthetic
  source 1..21: mol_type = other RNA
gtcgcggaggcggctccgggg

SEQ ID NO: 8470 - RNA, 21 nt, synthetic construct
  misc_feature 1..21: note = Synthetic
  source 1..21: mol_type = other RNA
gtcgggaacaggtcgggtggt

SEQ ID NO: 8471 - RNA, 21 nt, synthetic construct
  misc_feature 1..21: note = Synthetic
  source 1..21: mol_type = other RNA
gtcgggaggatgggcaccagg

SEQ ID NO: 8472 - RNA, 21 nt, synthetic construct
  misc_feature 1..21: note = Synthetic
  source 1..21: mol_type = other RNA
gtcgggatcctgacactcatc

SEQ ID NO: 8473 - RNA, 21 nt, synthetic construct
  misc_feature 1..21: note = Synthetic
  source 1..21: mol_type = other RNA
gtcggggcacaggcactcgta

SEQ ID NO: 8474 - RNA, 21 nt, synthetic construct
  misc_feature 1..21: note = Synthetic
  source 1..21: mol_type = other RNA
gtcggggccaccatcacagcg

SEQ ID NO: 8475 - RNA, 21 nt, synthetic construct
  misc_feature 1..21: note = Synthetic
  source 1..21: mol_type = other RNA
gtcgggggcctggatgtctct

SEQ ID NO: 8476 - RNA, 21 nt, synthetic construct
  misc_feature 1..21: note = Synthetic
  source 1..21: mol_type = other RNA
gtcggggtcgttgtcgcaggc

SEQ ID NO: 8477 - RNA, 21 nt, synthetic construct
  misc_feature 1..21: note = Synthetic
  source 1..21: mol_type = other RNA
gtcgggtggttgtgtgctgtg

SEQ ID NO: 8478 - RNA, 21 nt, synthetic construct
  misc_feature 1..21: note = Synthetic
  source 1..21: mol_type = other RNA
gtcggtccagtagatgttgct

SEQ ID NO: 8479 - RNA, 21 nt, synthetic construct
  misc_feature 1..21: note = Synthetic
  source 1..21: mol_type = other RNA
gtcgtcgcctttgtgacagga

SEQ ID NO: 8480 - RNA, 21 nt, synthetic construct
  misc_feature 1..21: note = Synthetic
  source 1..21: mol_type = other RNA
gtcgttgtcgcaggcccacag

SEQ ID NO: 8481 - RNA, 21 nt, synthetic construct
  misc_feature 1..21: note = Synthetic
  source 1..21: mol_type = other RNA
gtctagcaaggcttgcataga

SEQ ID NO: 8482 - RNA, 21 nt, synthetic construct
  misc_feature 1..21: note = Synthetic
  source 1..21: mol_type = other RNA
gtctcaggaagggttctgggc

SEQ ID NO: 8483 - RNA, 21 nt, synthetic construct
  misc_feature 1..21: note = Synthetic
  source 1..21: mol_type = other RNA
gtctcaggcacttaataaata

SEQ ID NO: 8484 - RNA, 21 nt, synthetic construct
  misc_feature 1..21: note = Synthetic
  source 1..21: mol_type = other RNA
gtctccaactcctgaactcaa

SEQ ID NO: 8485 - RNA, 21 nt, synthetic construct
  misc_feature 1..21: note = Synthetic
  source 1..21: mol_type = other RNA
gtctcctgggactcatcagag

SEQ ID NO: 8486 - RNA, 21 nt, synthetic construct
  misc_feature 1..21: note = Synthetic
  source 1..21: mol_type = other RNA
gtctcctgggtggccactgca

SEQ ID NO: 8487 - RNA, 21 nt, synthetic construct
  misc_feature 1..21: note = Synthetic
  source 1..21: mol_type = other RNA
gtctcgaggggtagctgtagc

SEQ ID NO: 8488 - RNA, 21 nt, synthetic construct
  misc_feature 1..21: note = Synthetic
  source 1..21: mol_type = other RNA
gtctcgatctcctgacctcat

SEQ ID NO: 8489 - RNA, 21 nt, synthetic construct
  misc_feature 1..21: note = Synthetic
  source 1..21: mol_type = other RNA
gtctcgctctgtcgcccaggc

SEQ ID NO: 8490 - RNA, 21 nt, synthetic construct
  misc_feature 1..21: note = Synthetic
  source 1..21: mol_type = other RNA
gtctcggtgccaccacggatt

SEQ ID NO: 8491 - RNA, 21 nt, synthetic construct
  misc_feature 1..21: note = Synthetic
  source 1..21: mol_type = other RNA
gtctctagccatgttgcagac

SEQ ID NO: 8492 - RNA, 21 nt, synthetic construct
  misc_feature 1..21: note = Synthetic
  source 1..21: mol_type = other RNA
gtctctccggacatcagtgca

SEQ ID NO: 8493 - RNA, 21 nt, synthetic construct
  misc_feature 1..21: note = Synthetic
  source 1..21: mol_type = other RNA
gtctctgctgatgacggtgtc

SEQ ID NO: 8494 - RNA, 21 nt, synthetic construct
  misc_feature 1..21: note = Synthetic
  source 1..21: mol_type = other RNA
gtctgacggaggctgtcactg

SEQ ID NO: 8495 - RNA, 21 nt, synthetic construct
  misc_feature 1..21: note = Synthetic
  source 1..21: mol_type = other RNA
gtctgagccgtccaagcagtc

SEQ ID NO: 8496 - RNA, 21 nt, synthetic construct
  misc_feature 1..21: note = Synthetic
  source 1..21: mol_type = other RNA
gtctgagccgttgtcgcagtc

SEQ ID NO: 8497 - RNA, 21 nt, synthetic construct
  misc_feature 1..21: note = Synthetic
  source 1..21: mol_type = other RNA
gtctgagtcacagacgaactg

SEQ ID NO: 8498 - RNA, 21 nt, synthetic construct
  misc_feature 1..21: note = Synthetic
  source 1..21: mol_type = other RNA
gtctggccaaattcatttttt

SEQ ID NO: 8499 - RNA, 21 nt, synthetic construct
  misc_feature 1..21: note = Synthetic
  source 1..21: mol_type = other RNA
gtcttactatgttgcccaggc

SEQ ID NO: 8500 - RNA, 21 nt, synthetic construct
  misc_feature 1..21: note = Synthetic
  source 1..21: mol_type = other RNA
gtcttcatctgttgcccaggc

SEQ ID NO: 8501 - RNA, 21 nt, synthetic construct
  misc_feature 1..21: note = Synthetic
  source 1..21: mol_type = other RNA
gtcttccggttgcccccgttg

SEQ ID NO: 8502 - RNA, 21 nt, synthetic construct
  misc_feature 1..21: note = Synthetic
  source 1..21: mol_type = other RNA
gtcttctctgtctttgaataa

SEQ ID NO: 8503 - RNA, 21 nt, synthetic construct
  misc_feature 1..21: note = Synthetic
  source 1..21: mol_type = other RNA
gtcttctgatagacggggttg

SEQ ID NO: 8504 - RNA, 21 nt, synthetic construct
  misc_feature 1..21: note = Synthetic
  source 1..21: mol_type = other RNA
gtcttggcactggaactcgtt

SEQ ID NO: 8505 - RNA, 21 nt, synthetic construct
  misc_feature 1..21: note = Synthetic
  source 1..21: mol_type = other RNA
gtcttgggggagcacgtctcc

SEQ ID NO: 8506 - RNA, 21 nt, synthetic construct
  misc_feature 1..21: note = Synthetic
  source 1..21: mol_type = other RNA
gtcttggggggacagccttgc

SEQ ID NO: 8507 - RNA, 21 nt, synthetic construct
  misc_feature 1..21: note = Synthetic
  source 1..21: mol_type = other RNA
gtctttgaataaaacaaggcc

SEQ ID NO: 8508 - RNA, 21 nt, synthetic construct
  misc_feature 1..21: note = Synthetic
  source 1..21: mol_type = other RNA
gtgaacttgatcggggctggt

SEQ ID NO: 8509 - RNA, 21 nt, synthetic construct
  misc_feature 1..21: note = Synthetic
  source 1..21: mol_type = other RNA
gtgaagaagaggtaggcgatg

SEQ ID NO: 8510 - RNA, 21 nt, synthetic construct
  misc_feature 1..21: note = Synthetic
  source 1..21: mol_type = other RNA
gtgaagtttggagtcaaccca

SEQ ID NO: 8511 - RNA, 21 nt, synthetic construct
  misc_feature 1..21: note = Synthetic
  source 1..21: mol_type = other RNA
gtgaatgagtttggtctcggt

SEQ ID NO: 8512 - RNA, 21 nt, synthetic construct
  misc_feature 1..21: note = Synthetic
  source 1..21: mol_type = other RNA
gtgaatggcttggaggcattt

SEQ ID NO: 8513 - RNA, 21 nt, synthetic construct
  misc_feature 1..21: note = Synthetic
  source 1..21: mol_type = other RNA
gtgacacccatctcccagaag

SEQ ID NO: 8514 - RNA, 21 nt, synthetic construct
  misc_feature 1..21: note = Synthetic
  source 1..21: mol_type = other RNA
gtgacacttgaacttgttggg

SEQ ID NO: 8515 - RNA, 21 nt, synthetic construct
  misc_feature 1..21: note = Synthetic
  source 1..21: mol_type = other RNA
gtgacagacaagcacgtctcc

SEQ ID NO: 8516 - RNA, 21 nt, synthetic construct
  misc_feature 1..21: note = Synthetic
  source 1..21: mol_type = other RNA
gtgacaggaaccgcggaggaa

SEQ ID NO: 8517 - RNA, 21 nt, synthetic construct
  misc_feature 1..21: note = Synthetic
  source 1..21: mol_type = other RNA
gtgacagggcaaaggctaacc

SEQ ID NO: 8518 - RNA, 21 nt, synthetic construct
  misc_feature 1..21: note = Synthetic
  source 1..21: mol_type = other RNA
gtgacatcttcacgcgggagt

SEQ ID NO: 8519 - RNA, 21 nt, synthetic construct
  misc_feature 1..21: note = Synthetic
  source 1..21: mol_type = other RNA
gtgaccagtgactcaggctct

SEQ ID NO: 8520 - RNA, 21 nt, synthetic construct
  misc_feature 1..21: note = Synthetic
  source 1..21: mol_type = other RNA
gtgactcaggctctgcctctg

SEQ ID NO: 8521 - RNA, 21 nt, synthetic construct
  misc_feature 1..21: note = Synthetic
  source 1..21: mol_type = other RNA
gtgagacattgtcactatctc

SEQ ID NO: 8522 - RNA, 21 nt, synthetic construct
  misc_feature 1..21: note = Synthetic
  source 1..21: mol_type = other RNA
gtgagcaccgggcaggaggcc

SEQ ID NO: 8523 - RNA, 21 nt, synthetic construct
  misc_feature 1..21: note = Synthetic
  source 1..21: mol_type = other RNA
gtgagccactgcgcccggcct

SEQ ID NO: 8524 - RNA, 21 nt, synthetic construct
  misc_feature 1..21: note = Synthetic
  source 1..21: mol_type = other RNA
gtgagcccaggggtggcccca

SEQ ID NO: 8525 - RNA, 21 nt, synthetic construct
  misc_feature 1..21: note = Synthetic
  source 1..21: mol_type = other RNA
gtgaggcacctgtgtctggcc

SEQ ID NO: 8526 - RNA, 21 nt, synthetic construct
  misc_feature 1..21: note = Synthetic
  source 1..21: mol_type = other RNA
gtgaggcagctcctcatgtcc

SEQ ID NO: 8527 - RNA, 21 nt, synthetic construct
  misc_feature 1..21: note = Synthetic
  source 1..21: mol_type = other RNA
gtgaggcggttggcactgaaa

SEQ ID NO: 8528 - RNA, 21 nt, synthetic construct
  misc_feature 1..21: note = Synthetic
  source 1..21: mol_type = other RNA
gtgaggttgtggaagagaacc

SEQ ID NO: 8529 - RNA, 21 nt, synthetic construct
  misc_feature 1..21: note = Synthetic
  source 1..21: mol_type = other RNA
gtgataacagtttcaaccaat

SEQ ID NO: 8530 - RNA, 21 nt, synthetic construct
  misc_feature 1..21: note = Synthetic
  source 1..21: mol_type = other RNA
gtgatccagctcagcctccca

SEQ ID NO: 8531 - RNA, 21 nt, synthetic construct
  misc_feature 1..21: note = Synthetic
  source 1..21: mol_type = other RNA
gtgatgcattcgccgctgtga

SEQ ID NO: 8532 - RNA, 21 nt, synthetic construct
  misc_feature 1..21: note = Synthetic
  source 1..21: mol_type = other RNA
gtgatgccattgggccactga

SEQ ID NO: 8533 - RNA, 21 nt, synthetic construct
  misc_feature 1..21: note = Synthetic
  source 1..21: mol_type = other RNA
gtgcaaaataataacacaaat

SEQ ID NO: 8534 - RNA, 21 nt, synthetic construct
  misc_feature 1..21: note = Synthetic
  source 1..21: mol_type = other RNA
gtgcaaacataacaaaaaatc

SEQ ID NO: 8535 - RNA, 21 nt, synthetic construct
  misc_feature 1..21: note = Synthetic
  source 1..21: mol_type = other RNA
gtgcaaataatctttgtacat

SEQ ID NO: 8536 - RNA, 21 nt, synthetic construct
  misc_feature 1..21: note = Synthetic
  source 1..21: mol_type = other RNA
gtgcaacagtaacacggcgat

SEQ ID NO: 8537 - RNA, 21 nt, synthetic construct
  misc_feature 1..21: note = Synthetic
  source 1..21: mol_type = other RNA
gtgcaaggagaccacgggaat

SEQ ID NO: 8538 - RNA, 21 nt, synthetic construct
  misc_feature 1..21: note = Synthetic
  source 1..21: mol_type = other RNA
gtgcaggccacgtgtcctcac

SEQ ID NO: 8539 - RNA, 21 nt, synthetic construct
  misc_feature 1..21: note = Synthetic
  source 1..21: mol_type = other RNA
gtgcagtggctcgatcatggc

SEQ ID NO: 8540 - RNA, 21 nt, synthetic construct
  misc_feature 1..21: note = Synthetic
  source 1..21: mol_type = other RNA
gtgcatgttttaaacacatac

SEQ ID NO: 8541 - RNA, 21 nt, synthetic construct
  misc_feature 1..21: note = Synthetic
  source 1..21: mol_type = other RNA
gtgccaccacggattcagcca

SEQ ID NO: 8542 - RNA, 21 nt, synthetic construct
  misc_feature 1..21: note = Synthetic
  source 1..21: mol_type = other RNA
gtgccaccgtacccagctgat

SEQ ID NO: 8543 - RNA, 21 nt, synthetic construct
  misc_feature 1..21: note = Synthetic
  source 1..21: mol_type = other RNA
gtgccatctgctgttgtgtgt

SEQ ID NO: 8544 - RNA, 21 nt, synthetic construct
  misc_feature 1..21: note = Synthetic
  source 1..21: mol_type = other RNA
gtgcccaggacagagtcggtc

SEQ ID NO: 8545 - RNA, 21 nt, synthetic construct
  misc_feature 1..21: note = Synthetic
  source 1..21: mol_type = other RNA
gtgcccgccaccacgcccggc

SEQ ID NO: 8546 - RNA, 21 nt, synthetic construct
  misc_feature 1..21: note = Synthetic
  source 1..21: mol_type = other RNA
gtgccggttggtgaagaagag

SEQ ID NO: 8547 - RNA, 21 nt, synthetic construct
  misc_feature 1..21: note = Synthetic
  source 1..21: mol_type = other RNA
gtgctccgaaaccagaaaggc

SEQ ID NO: 8548 - RNA, 21 nt, synthetic construct
  misc_feature 1..21: note = Synthetic
  source 1..21: mol_type = other RNA
gtgctgcagatcattctctgg

SEQ ID NO: 8549 - RNA, 21 nt, synthetic construct
  misc_feature 1..21: note = Synthetic
  source 1..21: mol_type = other RNA
gtgctgggattacaggcgtga

SEQ ID NO: 8550 - RNA, 21 nt, synthetic construct
  misc_feature 1..21: note = Synthetic
  source 1..21: mol_type = other RNA
gtgctgtgtccttacggctgt

SEQ ID NO: 8551 - RNA, 21 nt, synthetic construct
  misc_feature 1..21: note = Synthetic
  source 1..21: mol_type = other RNA
gtggaactcgaaggccgagca

SEQ ID NO: 8552 - RNA, 21 nt, synthetic construct
  misc_feature 1..21: note = Synthetic
  source 1..21: mol_type = other RNA
gtggaagagaaccatatcctc

SEQ ID NO: 8553 - RNA, 21 nt, synthetic construct
  misc_feature 1..21: note = Synthetic
  source 1..21: mol_type = other RNA
gtggaagcactaggtgggcgg

SEQ ID NO: 8554 - RNA, 21 nt, synthetic construct
  misc_feature 1..21: note = Synthetic
  source 1..21: mol_type = other RNA
gtggacctcatcctctgtggt

SEQ ID NO: 8555 - RNA, 21 nt, synthetic construct
  misc_feature 1..21: note = Synthetic
  source 1..21: mol_type = other RNA
gtggagagaaactcaaaactt

SEQ ID NO: 8556 - RNA, 21 nt, synthetic construct
  misc_feature 1..21: note = Synthetic
  source 1..21: mol_type = other RNA
gtggagctgacctttagcctg

SEQ ID NO: 8557 - RNA, 21 nt, synthetic construct
  misc_feature 1..21: note = Synthetic
  source 1..21: mol_type = other RNA
gtggagctgttgcactggaag

SEQ ID NO: 8558 - RNA, 21 nt, synthetic construct
  misc_feature 1..21: note = Synthetic
  source 1..21: mol_type = other RNA
gtggatccagtccacagccag

SEQ ID NO: 8559 - RNA, 21 nt, synthetic construct
  misc_feature 1..21: note = Synthetic
  source 1..21: mol_type = other RNA
gtggatgaggcagggccaggg

SEQ ID NO: 8560 - RNA, 21 nt, synthetic construct
  misc_feature 1..21: note = Synthetic
  source 1..21: mol_type = other RNA
gtggatgcactcgccacttag

SEQ ID NO: 8561 - RNA, 21 nt, synthetic construct
  misc_feature 1..21: note = Synthetic
  source 1..21: mol_type = other RNA
gtggatgtctcctgggtggcc

SEQ ID NO: 8562 - RNA, 21 nt, synthetic construct
  misc_feature 1..21: note = Synthetic
  source 1..21: mol_type = other RNA
gtggcaaatgtggacctcatc

SEQ ID NO: 8563 - RNA, 21 nt, synthetic construct
  misc_feature 1..21: note = Synthetic
  source 1..21: mol_type = other RNA
gtggcagcgaaactcgtcctg

SEQ ID NO: 8564 - RNA, 21 nt, synthetic construct
  misc_feature 1..21: note = Synthetic
  source 1..21: mol_type = other RNA
gtggcataatcatagctcacg

SEQ ID NO: 8565 - RNA, 21 nt, synthetic construct
  misc_feature 1..21: note = Synthetic
  source 1..21: mol_type = other RNA
gtggcatcatttggtgaatga

SEQ ID NO: 8566 - RNA, 21 nt, synthetic construct
  misc_feature 1..21: note = Synthetic
  source 1..21: mol_type = other RNA
gtggccacagcgcagttttcc

SEQ ID NO: 8567 - RNA, 21 nt, synthetic construct
  misc_feature 1..21: note = Synthetic
  source 1..21: mol_type = other RNA
gtggccacaggacagccttgc

SEQ ID NO: 8568 - RNA, 21 nt, synthetic construct
  misc_feature 1..21: note = Synthetic
  source 1..21: mol_type = other RNA
gtggccactgcagcctcagcc

SEQ ID NO: 8569 - RNA, 21 nt, synthetic construct
  misc_feature 1..21: note = Synthetic
  source 1..21: mol_type = other RNA
gtggccccaggcagccgggag

SEQ ID NO: 8570 - RNA, 21 nt, synthetic construct
  misc_feature 1..21: note = Synthetic
  source 1..21: mol_type = other RNA
gtggccgggggcccctctgtg

SEQ ID NO: 8571 - RNA, 21 nt, synthetic construct
  misc_feature 1..21: note = Synthetic
  source 1..21: mol_type = other RNA
gtggcgatggggaggacaatg

SEQ ID NO: 8572 - RNA, 21 nt, synthetic construct
  misc_feature 1..21: note = Synthetic
  source 1..21: mol_type = other RNA
gtggcgcaatctcggctcact

SEQ ID NO: 8573 - RNA, 21 nt, synthetic construct
  misc_feature 1..21: note = Synthetic
  source 1..21: mol_type = other RNA
gtggctcgatcatggctcact

SEQ ID NO: 8574 - RNA, 21 nt, synthetic construct
  misc_feature 1..21: note = Synthetic
  source 1..21: mol_type = other RNA
gtggctgaagatctcggctgc

SEQ ID NO: 8575 - RNA, 21 nt, synthetic construct
  misc_feature 1..21: note = Synthetic
  source 1..21: mol_type = other RNA
gtgggaacagccgccgttgtt

SEQ ID NO: 8576 - RNA, 21 nt, synthetic construct
  misc_feature 1..21: note = Synthetic
  source 1..21: mol_type = other RNA
gtgggccagcctcttttcatc

SEQ ID NO: 8577 - RNA, 21 nt, synthetic construct
  misc_feature 1..21: note = Synthetic
  source 1..21: mol_type = other RNA
gtgggcggacataaagacgac

SEQ ID NO: 8578 - RNA, 21 nt, synthetic construct
  misc_feature 1..21: note = Synthetic
  source 1..21: mol_type = other RNA
gtgggctctgtcaagctgggt

SEQ ID NO: 8579 - RNA, 21 nt, synthetic construct
  misc_feature 1..21: note = Synthetic
  source 1..21: mol_type = other RNA
gtggggacggaggtgtcgcca

SEQ ID NO: 8580 - RNA, 21 nt, synthetic construct
  misc_feature 1..21: note = Synthetic
  source 1..21: mol_type = other RNA
gtggggcgagggcgcccccca

SEQ ID NO: 8581 - RNA, 21 nt, synthetic construct
  misc_feature 1..21: note = Synthetic
  source 1..21: mol_type = other RNA
gtgggggtccagctggaagcc

SEQ ID NO: 8582 - RNA, 21 nt, synthetic construct
  misc_feature 1..21: note = Synthetic
  source 1..21: mol_type = other RNA
gtgggggttgatctgcggggc

SEQ ID NO: 8583 - RNA, 21 nt, synthetic construct
  misc_feature 1..21: note = Synthetic
  source 1..21: mol_type = other RNA
gtgggtaggggtcgggaggat

SEQ ID NO: 8584 - RNA, 21 nt, synthetic construct
  misc_feature 1..21: note = Synthetic
  source 1..21: mol_type = other RNA
gtgggtcatgattcgggggtg

SEQ ID NO: 8585 - RNA, 21 nt, synthetic construct
  misc_feature 1..21: note = Synthetic
  source 1..21: mol_type = other RNA
gtggtcctctcacaccagttc

SEQ ID NO: 8586 - RNA, 21 nt, synthetic construct
  misc_feature 1..21: note = Synthetic
  source 1..21: mol_type = other RNA
gtggtcttctgatagacgggg

SEQ ID NO: 8587 - RNA, 21 nt, synthetic construct
  misc_feature 1..21: note = Synthetic
  source 1..21: mol_type = other RNA
gtggtgagcccaggggtggcc

SEQ ID NO: 8588 - RNA, 21 nt, synthetic construct
  misc_feature 1..21: note = Synthetic
  source 1..21: mol_type = other RNA
gtggttgtgtgctgtgtcctt

SEQ ID NO: 8589 - RNA, 21 nt, synthetic construct
  misc_feature 1..21: note = Synthetic
  source 1..21: mol_type = other RNA
gtggtttaaaaagtgacaccc

SEQ ID NO: 8590 - RNA, 21 nt, synthetic construct
  misc_feature 1..21: note = Synthetic
  source 1..21: mol_type = other RNA
gtgtacaactctgaactgaga

SEQ ID NO: 8591 - RNA, 21 nt, synthetic construct
  misc_feature 1..21: note = Synthetic
  source 1..21: mol_type = other RNA
gtgtactcgctccggtccagc

SEQ ID NO: 8592 - RNA, 21 nt, synthetic construct
  misc_feature 1..21: note = Synthetic
  source 1..21: mol_type = other RNA
gtgtatatatatatatataag

SEQ ID NO: 8593 - RNA, 21 nt, synthetic construct
  misc_feature 1..21: note = Synthetic
  source 1..21: mol_type = other RNA
gtgtatgtcgcggaggcggct

SEQ ID NO: 8594 - RNA, 21 nt, synthetic construct
  misc_feature 1..21: note = Synthetic
  source 1..21: mol_type = other RNA
gtgtcacattaacgcagccaa

SEQ ID NO: 8595 - RNA, 21 nt, synthetic construct
  misc_feature 1..21: note = Synthetic
  source 1..21: mol_type = other RNA
gtgtcacggtggagagaaact

SEQ ID NO: 8596 - RNA, 21 nt, synthetic construct
  misc_feature 1..21: note = Synthetic
  source 1..21: mol_type = other RNA
gtgtcagacagccttgctcgt

SEQ ID NO: 8597 - RNA, 21 nt, synthetic construct
  misc_feature 1..21: note = Synthetic
  source 1..21: mol_type = other RNA
gtgtcataggaagagacgccg

SEQ ID NO: 8598 - RNA, 21 nt, synthetic construct
  misc_feature 1..21: note = Synthetic
  source 1..21: mol_type = other RNA
gtgtcatcctggtccccccgg

SEQ ID NO: 8599 - RNA, 21 nt, synthetic construct
  misc_feature 1..21: note = Synthetic
  source 1..21: mol_type = other RNA
gtgtccagagcgaccacgttc

SEQ ID NO: 8600 - RNA, 21 nt, synthetic construct
  misc_feature 1..21: note = Synthetic
  source 1..21: mol_type = other RNA
gtgtcccgacccggatcacga

SEQ ID NO: 8601 - RNA, 21 nt, synthetic construct
  misc_feature 1..21: note = Synthetic
  source 1..21: mol_type = other RNA
gtgtcctagctggaaaccctg

SEQ ID NO: 8602 - RNA, 21 nt, synthetic construct
  misc_feature 1..21: note = Synthetic
  source 1..21: mol_type = other RNA
gtgtcctcacggccaaggtaa

SEQ ID NO: 8603 - RNA, 21 nt, synthetic construct
  misc_feature 1..21: note = Synthetic
  source 1..21: mol_type = other RNA
gtgtcctgacagccacacctg

SEQ ID NO: 8604 - RNA, 21 nt, synthetic construct
  misc_feature 1..21: note = Synthetic
  source 1..21: mol_type = other RNA
gtgtccttacggctgtggagc

SEQ ID NO: 8605 - RNA, 21 nt, synthetic construct
  misc_feature 1..21: note = Synthetic
  source 1..21: mol_type = other RNA
gtgtcgccacagagcacagcg

SEQ ID NO: 8606 - RNA, 21 nt, synthetic construct
  misc_feature 1..21: note = Synthetic
  source 1..21: mol_type = other RNA
gtgtcgggaacaggtcgggtg

SEQ ID NO: 8607 - RNA, 21 nt, synthetic construct
  misc_feature 1..21: note = Synthetic
  source 1..21: mol_type = other RNA
gtgtcgggatcctgacactca

SEQ ID NO: 8608 - RNA, 21 nt, synthetic construct
  misc_feature 1..21: note = Synthetic
  source 1..21: mol_type = other RNA
gtgtctcaggcacttaataaa

SEQ ID NO: 8609 - RNA, 21 nt, synthetic construct
  misc_feature 1..21: note = Synthetic
  source 1..21: mol_type = other RNA
gtgtctggccaaattcatttt

SEQ ID NO: 8610 - RNA, 21 nt, synthetic construct
  misc_feature 1..21: note = Synthetic
  source 1..21: mol_type = other RNA
gtgtgctgtgtccttacggct

SEQ ID NO: 8611 - RNA, 21 nt, synthetic construct
  misc_feature 1..21: note = Synthetic
  source 1..21: mol_type = other RNA
gtgtgggggtccagctggaag

SEQ ID NO: 8612 - RNA, 21 nt, synthetic construct
  misc_feature 1..21: note = Synthetic
  source 1..21: mol_type = other RNA
gtgtgtatatatatatatata

SEQ ID NO: 8613 - RNA, 21 nt, synthetic construct
  misc_feature 1..21: note = Synthetic
  source 1..21: mol_type = other RNA
gtgtgttgaaagccacttgct

SEQ ID NO: 8614 - RNA, 21 nt, synthetic construct
  misc_feature 1..21: note = Synthetic
  source 1..21: mol_type = other RNA
gtgttagccaggatggtctcg

SEQ ID NO: 8615 - RNA, 21 nt, synthetic construct
  misc_feature 1..21: note = Synthetic
  source 1..21: mol_type = other RNA
gtgttgaaagccacttgcttc

SEQ ID NO: 8616 - RNA, 21 nt, synthetic construct
  misc_feature 1..21: note = Synthetic
  source 1..21: mol_type = other RNA
gtgttttgtccctggggacaa

SEQ ID NO: 8617 - RNA, 21 nt, synthetic construct
  misc_feature 1..21: note = Synthetic
  source 1..21: mol_type = other RNA
gttagccaggatggtctcgat

SEQ ID NO: 8618 - RNA, 21 nt, synthetic construct
  misc_feature 1..21: note = Synthetic
  source 1..21: mol_type = other RNA
gttcacaccattctcctgcct

SEQ ID NO: 8619 - RNA, 21 nt, synthetic construct
  misc_feature 1..21: note = Synthetic
  source 1..21: mol_type = other RNA
gttcacgcagagctggctgca

SEQ ID NO: 8620 - RNA, 21 nt, synthetic construct
  misc_feature 1..21: note = Synthetic
  source 1..21: mol_type = other RNA
gttcacgccacgtcatcctcc

SEQ ID NO: 8621 - RNA, 21 nt, synthetic construct
  misc_feature 1..21: note = Synthetic
  source 1..21: mol_type = other RNA
gttcactcctcttggctgggt

SEQ ID NO: 8622 - RNA, 21 nt, synthetic construct
  misc_feature 1..21: note = Synthetic
  source 1..21: mol_type = other RNA
gttcatctgaccagtcccggc

SEQ ID NO: 8623 - RNA, 21 nt, synthetic construct
  misc_feature 1..21: note = Synthetic
  source 1..21: mol_type = other RNA
gttcatttaagaaatttaatt

SEQ ID NO: 8624 - RNA, 21 nt, synthetic construct
  misc_feature 1..21: note = Synthetic
  source 1..21: mol_type = other RNA
gttccccagtcagtccagtac

SEQ ID NO: 8625 - RNA, 21 nt, synthetic construct
  misc_feature 1..21: note = Synthetic
  source 1..21: mol_type = other RNA
gttccctgcactgggggggac

SEQ ID NO: 8626 - RNA, 21 nt, synthetic construct
  misc_feature 1..21: note = Synthetic
  source 1..21: mol_type = other RNA
gttcctcaggttggggatgag

SEQ ID NO: 8627 - RNA, 21 nt, synthetic construct
  misc_feature 1..21: note = Synthetic
  source 1..21: mol_type = other RNA
gttcgtgcaaataatctttgt

SEQ ID NO: 8628 - RNA, 21 nt, synthetic construct
  misc_feature 1..21: note = Synthetic
  source 1..21: mol_type = other RNA
gttctccctgaataacgtttt

SEQ ID NO: 8629 - RNA, 21 nt, synthetic construct
  misc_feature 1..21: note = Synthetic
  source 1..21: mol_type = other RNA
gttctcgatattcacgatcac

SEQ ID NO: 8630 - RNA, 21 nt, synthetic construct
  misc_feature 1..21: note = Synthetic
  source 1..21: mol_type = other RNA
gttctgcctcccagatgaata

SEQ ID NO: 8631 - RNA, 21 nt, synthetic construct
  misc_feature 1..21: note = Synthetic
  source 1..21: mol_type = other RNA
gttctgggcagggacgggact

SEQ ID NO: 8632 - RNA, 21 nt, synthetic construct
  misc_feature 1..21: note = Synthetic
  source 1..21: mol_type = other RNA
gttcttaagccgccagttctt

SEQ ID NO: 8633 - RNA, 21 nt, synthetic construct
  misc_feature 1..21: note = Synthetic
  source 1..21: mol_type = other RNA
gttcttccatagaaggaagac

SEQ ID NO: 8634 - RNA, 21 nt, synthetic construct
  misc_feature 1..21: note = Synthetic
  source 1..21: mol_type = other RNA
gttgaaagccacttgcttctc

SEQ ID NO: 8635 - RNA, 21 nt, synthetic construct
  misc_feature 1..21: note = Synthetic
  source 1..21: mol_type = other RNA
gttgacacggcccccacagct

SEQ ID NO: 8636 - RNA, 21 nt, synthetic construct
  misc_feature 1..21: note = Synthetic
  source 1..21: mol_type = other RNA
gttgacatcgatgcttgagat

SEQ ID NO: 8637 - RNA, 21 nt, synthetic construct
  misc_feature 1..21: note = Synthetic
  source 1..21: mol_type = other RNA
gttgacatcggaacctgtgag

SEQ ID NO: 8638 - RNA, 21 nt, synthetic construct
  misc_feature 1..21: note = Synthetic
  source 1..21: mol_type = other RNA
gttgactcctgagtttagggg

SEQ ID NO: 8639 - RNA, 21 nt, synthetic construct
  misc_feature 1..21: note = Synthetic
  source 1..21: mol_type = other RNA
gttgatctgcggggcagggag

SEQ ID NO: 8640 - RNA, 21 nt, synthetic construct
  misc_feature 1..21: note = Synthetic
  source 1..21: mol_type = other RNA
gttgatgatatctgtccaaaa

SEQ ID NO: 8641 - RNA, 21 nt, synthetic construct
  misc_feature 1..21: note = Synthetic
  source 1..21: mol_type = other RNA
gttgatgctgttgatgttctt

SEQ ID NO: 8642 - RNA, 21 nt, synthetic construct
  misc_feature 1..21: note = Synthetic
  source 1..21: mol_type = other RNA
gttgatgttcttaagccgcca

SEQ ID NO: 8643 - RNA, 21 nt, synthetic construct
  misc_feature 1..21: note = Synthetic
  source 1..21: mol_type = other RNA
gttgcacacagtccagttcgt

SEQ ID NO: 8644 - RNA, 21 nt, synthetic construct
  misc_feature 1..21: note = Synthetic
  source 1..21: mol_type = other RNA
gttgcactggaagctggcggg

SEQ ID NO: 8645 - RNA, 21 nt, synthetic construct
  misc_feature 1..21: note = Synthetic
  source 1..21: mol_type = other RNA
gttgcagactttgtccagggt

SEQ ID NO: 8646 - RNA, 21 nt, synthetic construct
  misc_feature 1..21: note = Synthetic
  source 1..21: mol_type = other RNA
gttgcccaggctggaaagcag

SEQ ID NO: 8647 - RNA, 21 nt, synthetic construct
  misc_feature 1..21: note = Synthetic
  source 1..21: mol_type = other RNA
gttgcccaggctggagtgcag

SEQ ID NO: 8648 - RNA, 21 nt, synthetic construct
  misc_feature 1..21: note = Synthetic
  source 1..21: mol_type = other RNA
gttgcccccgttgacatcgat

SEQ ID NO: 8649 - RNA, 21 nt, synthetic construct
  misc_feature 1..21: note = Synthetic
  source 1..21: mol_type = other RNA
gttgctcaggcctggtctcca

SEQ ID NO: 8650 - RNA, 21 nt, synthetic construct
  misc_feature 1..21: note = Synthetic
  source 1..21: mol_type = other RNA
gttgctgtggatccagtccac

SEQ ID NO: 8651 - RNA, 21 nt, synthetic construct
  misc_feature 1..21: note = Synthetic
  source 1..21: mol_type = other RNA
gttggcactgaaaatggcttc

SEQ ID NO: 8652 - RNA, 21 nt, synthetic construct
  misc_feature 1..21: note = Synthetic
  source 1..21: mol_type = other RNA
gttggggatgaggctggtgta

SEQ ID NO: 8653 - RNA, 21 nt, synthetic construct
  misc_feature 1..21: note = Synthetic
  source 1..21: mol_type = other RNA
gttgggtccctcgcagagtgt

SEQ ID NO: 8654 - RNA, 21 nt, synthetic construct
  misc_feature 1..21: note = Synthetic
  source 1..21: mol_type = other RNA
gttggtcccgcactctttgat

SEQ ID NO: 8655 - RNA, 21 nt, synthetic construct
  misc_feature 1..21: note = Synthetic
  source 1..21: mol_type = other RNA
gttggtgaagaagaggtaggc

SEQ ID NO: 8656 - RNA, 21 nt, synthetic construct
  misc_feature 1..21: note = Synthetic
  source 1..21: mol_type = other RNA
gttggtgccatctgctgttgt

SEQ ID NO: 8657 - RNA, 21 nt, synthetic construct
  misc_feature 1..21: note = Synthetic
  source 1..21: mol_type = other RNA
gttgtatttctgaaatagggt

SEQ ID NO: 8658 - RNA, 21 nt, synthetic construct
  misc_feature 1..21: note = Synthetic
  source 1..21: mol_type = other RNA
gttgtcaaagttgatgctgtt

SEQ ID NO: 8659 - RNA, 21 nt, synthetic construct
  misc_feature 1..21: note = Synthetic
  source 1..21: mol_type = other RNA
gttgtccaagcattcgttggt

SEQ ID NO: 8660 - RNA, 21 nt, synthetic construct
  misc_feature 1..21: note = Synthetic
  source 1..21: mol_type = other RNA
gttgtcgcaggcccacagctg

SEQ ID NO: 8661 - RNA, 21 nt, synthetic construct
  misc_feature 1..21: note = Synthetic
  source 1..21: mol_type = other RNA
gttgtcgcagtccacttggcc

SEQ ID NO: 8662 - RNA, 21 nt, synthetic construct
  misc_feature 1..21: note = Synthetic
  source 1..21: mol_type = other RNA
gttgtggaagagaaccatatc

SEQ ID NO: 8663 - RNA, 21 nt, synthetic construct
  misc_feature 1..21: note = Synthetic
  source 1..21: mol_type = other RNA
gttgtggcaaatgtggacctc

SEQ ID NO: 8664 - RNA, 21 nt, synthetic construct
  misc_feature 1..21: note = Synthetic
  source 1..21: mol_type = other RNA
gttgtgtgctgtgtccttacg

SEQ ID NO: 8665 - RNA, 21 nt, synthetic construct
  misc_feature 1..21: note = Synthetic
  source 1..21: mol_type = other RNA
gttgtgtgttgaaagccactt

SEQ ID NO: 8666 - RNA, 21 nt, synthetic construct
  misc_feature 1..21: note = Synthetic
  source 1..21: mol_type = other RNA
gttgttgtccaagcattcgtt

SEQ ID NO: 8667 - RNA, 21 nt, synthetic construct
  misc_feature 1..21: note = Synthetic
  source 1..21: mol_type = other RNA
gtttaaaaagtgacacccatc

SEQ ID NO: 8668 - RNA, 21 nt, synthetic construct
  misc_feature 1..21: note = Synthetic
  source 1..21: mol_type = other RNA
gtttaggggtttggcttagag

SEQ ID NO: 8669 - RNA, 21 nt, synthetic construct
  misc_feature 1..21: note = Synthetic
  source 1..21: mol_type = other RNA
gtttcaaccaatatacaaagt

SEQ ID NO: 8670 - RNA, 21 nt, synthetic construct
  misc_feature 1..21: note = Synthetic
  source 1..21: mol_type = other RNA
gtttcaacctcgtaaggaacc

SEQ ID NO: 8671 - RNA, 21 nt, synthetic construct
  misc_feature 1..21: note = Synthetic
  source 1..21: mol_type = other RNA
gtttcacgtgttagccaggat

SEQ ID NO: 8672 - RNA, 21 nt, synthetic construct
  misc_feature 1..21: note = Synthetic
  source 1..21: mol_type = other RNA
gtttccatcagagcactggaa

SEQ ID NO: 8673 - RNA, 21 nt, synthetic construct
  misc_feature 1..21: note = Synthetic
  source 1..21: mol_type = other RNA
gtttctcttatccttcacgag

SEQ ID NO: 8674 - RNA, 21 nt, synthetic construct
  misc_feature 1..21: note = Synthetic
  source 1..21: mol_type = other RNA
gtttctttcgcatctgtcgcc

SEQ ID NO: 8675 - RNA, 21 nt, synthetic construct
  misc_feature 1..21: note = Synthetic
  source 1..21: mol_type = other RNA
gtttgaggattgtgtcacggt

SEQ ID NO: 8676 - RNA, 21 nt, synthetic construct
  misc_feature 1..21: note = Synthetic
  source 1..21: mol_type = other RNA
gtttgcaaaaataaatagatt

SEQ ID NO: 8677 - RNA, 21 nt, synthetic construct
  misc_feature 1..21: note = Synthetic
  source 1..21: mol_type = other RNA
gtttggagtcaacccagtaga

SEQ ID NO: 8678 - RNA, 21 nt, synthetic construct
  misc_feature 1..21: note = Synthetic
  source 1..21: mol_type = other RNA
gtttggcttagagattggtgg

SEQ ID NO: 8679 - RNA, 21 nt, synthetic construct
  misc_feature 1..21: note = Synthetic
  source 1..21: mol_type = other RNA
gtttggtctcggtgccaccac

SEQ ID NO: 8680 - RNA, 21 nt, synthetic construct
  misc_feature 1..21: note = Synthetic
  source 1..21: mol_type = other RNA
gttttaaacacatacccatca

SEQ ID NO: 8681 - RNA, 21 nt, synthetic construct
  misc_feature 1..21: note = Synthetic
  source 1..21: mol_type = other RNA
gttttcagccaacaagttgac

SEQ ID NO: 8682 - RNA, 21 nt, synthetic construct
  misc_feature 1..21: note = Synthetic
  source 1..21: mol_type = other RNA
gttttcagtcaccagcgagta

SEQ ID NO: 8683 - RNA, 21 nt, synthetic construct
  misc_feature 1..21: note = Synthetic
  source 1..21: mol_type = other RNA
gttttcctcgtcagatttgtc

SEQ ID NO: 8684 - RNA, 21 nt, synthetic construct
  misc_feature 1..21: note = Synthetic
  source 1..21: mol_type = other RNA
gttttcctcttcacgcccttg

SEQ ID NO: 8685 - RNA, 21 nt, synthetic construct
  misc_feature 1..21: note = Synthetic
  source 1..21: mol_type = other RNA
gttttgtccctggggacaatt

SEQ ID NO: 8686 - RNA, 21 nt, synthetic construct
  misc_feature 1..21: note = Synthetic
  source 1..21: mol_type = other RNA
gtttttgtagagatgggatct

SEQ ID NO: 8687 - RNA, 21 nt, synthetic construct
  misc_feature 1..21: note = Synthetic
  source 1..21: mol_type = other RNA
gtttttttttgtttttttttt

SEQ ID NO: 8688 - RNA, 21 nt, synthetic construct
  misc_feature 1..21: note = Synthetic
  source 1..21: mol_type = other RNA
gttttttttttttgagacgga

SEQ ID NO: 8689 - RNA, 21 nt, synthetic construct
  misc_feature 1..21: note = Synthetic
  source 1..21: mol_type = other RNA
taaaaagtgacacccatctcc

SEQ ID NO: 8690 - RNA, 21 nt, synthetic construct
  misc_feature 1..21: note = Synthetic
  source 1..21: mol_type = other RNA
taaaacaaagctctggcaggc

SEQ ID NO: 8691 - RNA, 21 nt, synthetic construct
  misc_feature 1..21: note = Synthetic
  source 1..21: mol_type = other RNA
taaaacaaggccggcgaggtc

SEQ ID NO: 8692 - RNA, 21 nt, synthetic construct
  misc_feature 1..21: note = Synthetic
  source 1..21: mol_type = other RNA
taaacacatacccatcaacga

SEQ ID NO: 8693 - RNA, 21 nt, synthetic construct
  misc_feature 1..21: note = Synthetic
  source 1..21: mol_type = other RNA
taaacacgttgactcctgagt

SEQ ID NO: 8694 - RNA, 21 nt, synthetic construct
  misc_feature 1..21: note = Synthetic
  source 1..21: mol_type = other RNA
taaacttgggcgagtgggggt

SEQ ID NO: 8695 - RNA, 21 nt, synthetic construct
  misc_feature 1..21: note = Synthetic
  source 1..21: mol_type = other RNA
taaagaagaggcatttcagag

SEQ ID NO: 8696 - RNA, 21 nt, synthetic construct
  misc_feature 1..21: note = Synthetic
  source 1..21: mol_type = other RNA
taaagacccctacagcgctgc

SEQ ID NO: 8697 - RNA, 21 nt, synthetic construct
  misc_feature 1..21: note = Synthetic
  source 1..21: mol_type = other RNA
taaagacgacaatggcagttc

SEQ ID NO: 8698 - RNA, 21 nt, synthetic construct
  misc_feature 1..21: note = Synthetic
  source 1..21: mol_type = other RNA
taaatagattttatatatatg

SEQ ID NO: 8699 - RNA, 21 nt, synthetic construct
  misc_feature 1..21: note = Synthetic
  source 1..21: mol_type = other RNA
taaatatataaaacaaagctc

SEQ ID NO: 8700 - RNA, 21 nt, synthetic construct
  misc_feature 1..21: note = Synthetic
  source 1..21: mol_type = other RNA
taaatattaagggtgaccagt

SEQ ID NO: 8701 - RNA, 21 nt, synthetic construct
  misc_feature 1..21: note = Synthetic
  source 1..21: mol_type = other RNA
taacaaaaaatccccactatc

SEQ ID NO: 8702 - RNA, 21 nt, synthetic construct
  misc_feature 1..21: note = Synthetic
  source 1..21: mol_type = other RNA
taacacaaatgccaaatgtac

SEQ ID NO: 8703 - RNA, 21 nt, synthetic construct
  misc_feature 1..21: note = Synthetic
  source 1..21: mol_type = other RNA
taacacggcgatttcagaaag

SEQ ID NO: 8704 - RNA, 21 nt, synthetic construct
  misc_feature 1..21: note = Synthetic
  source 1..21: mol_type = other RNA
taacagtttcaaccaatatac

SEQ ID NO: 8705 - RNA, 21 nt, synthetic construct
  misc_feature 1..21: note = Synthetic
  source 1..21: mol_type = other RNA
taaccccctacacagggcccc

SEQ ID NO: 8706 - RNA, 21 nt, synthetic construct
  misc_feature 1..21: note = Synthetic
  source 1..21: mol_type = other RNA
taaccgggtgtctcaggcact

SEQ ID NO: 8707 - RNA, 21 nt, synthetic construct
  misc_feature 1..21: note = Synthetic
  source 1..21: mol_type = other RNA
taacctggctgtctagcaagg

SEQ ID NO: 8708 - RNA, 21 nt, synthetic construct
  misc_feature 1..21: note = Synthetic
  source 1..21: mol_type = other RNA
taacgcagccaacttcatcgc

SEQ ID NO: 8709 - RNA, 21 nt, synthetic construct
  misc_feature 1..21: note = Synthetic
  source 1..21: mol_type = other RNA
taacggagggcgactcgtgta

SEQ ID NO: 8710 - RNA, 21 nt, synthetic construct
  misc_feature 1..21: note = Synthetic
  source 1..21: mol_type = other RNA
taacgttttcctcttcacgcc

SEQ ID NO: 8711 - RNA, 21 nt, synthetic construct
  misc_feature 1..21: note = Synthetic
  source 1..21: mol_type = other RNA
taactttttggtttttgtaga

SEQ ID NO: 8712 - RNA, 21 nt, synthetic construct
  misc_feature 1..21: note = Synthetic
  source 1..21: mol_type = other RNA
taagaaatttaattgatcaca

SEQ ID NO: 8713 - RNA, 21 nt, synthetic construct
  misc_feature 1..21: note = Synthetic
  source 1..21: mol_type = other RNA
taagacattcaggctacaaaa

SEQ ID NO: 8714 - RNA, 21 nt, synthetic construct
  misc_feature 1..21: note = Synthetic
  source 1..21: mol_type = other RNA
taagagatggggtcttactat

SEQ ID NO: 8715 - RNA, 21 nt, synthetic construct
  misc_feature 1..21: note = Synthetic
  source 1..21: mol_type = other RNA
taagccgccagttcttccata

SEQ ID NO: 8716 - RNA, 21 nt, synthetic construct
  misc_feature 1..21: note = Synthetic
  source 1..21: mol_type = other RNA
taaggaaccgaggccttgagg

SEQ ID NO: 8717 - RNA, 21 nt, synthetic construct
  misc_feature 1..21: note = Synthetic
  source 1..21: mol_type = other RNA
taaggaaggtacaaacccacc

SEQ ID NO: 8718 - RNA, 21 nt, synthetic construct
  misc_feature 1..21: note = Synthetic
  source 1..21: mol_type = other RNA
taagggtgaccagtgactcag

SEQ ID NO: 8719 - RNA, 21 nt, synthetic construct
  misc_feature 1..21: note = Synthetic
  source 1..21: mol_type = other RNA
taaggtcattgcagacgtggg

SEQ ID NO: 8720 - RNA, 21 nt, synthetic construct
  misc_feature 1..21: note = Synthetic
  source 1..21: mol_type = other RNA
taagtgataacagtttcaacc

SEQ ID NO: 8721 - RNA, 21 nt, synthetic construct
  misc_feature 1..21: note = Synthetic
  source 1..21: mol_type = other RNA
taataaatattaagggtgacc

SEQ ID NO: 8722 - RNA, 21 nt, synthetic construct
  misc_feature 1..21: note = Synthetic
  source 1..21: mol_type = other RNA
taataacacaaatgccaaatg

SEQ ID NO: 8723 - RNA, 21 nt, synthetic construct
  misc_feature 1..21: note = Synthetic
  source 1..21: mol_type = other RNA
taatcatagctcacgacagcc

SEQ ID NO: 8724 - RNA, 21 nt, synthetic construct
  misc_feature 1..21: note = Synthetic
  source 1..21: mol_type = other RNA
taatctttgtacataaagaag

SEQ ID NO: 8725 - RNA, 21 nt, synthetic construct
  misc_feature 1..21: note = Synthetic
  source 1..21: mol_type = other RNA
taattgatcacagtaagacat

SEQ ID NO: 8726 - RNA, 21 nt, synthetic construct
  misc_feature 1..21: note = Synthetic
  source 1..21: mol_type = other RNA
taattttttgtatttttagta

SEQ ID NO: 8727 - RNA, 21 nt, synthetic construct
  misc_feature 1..21: note = Synthetic
  source 1..21: mol_type = other RNA
tacaaaaaccttctatacagt

SEQ ID NO: 8728 - RNA, 21 nt, synthetic construct
  misc_feature 1..21: note = Synthetic
  source 1..21: mol_type = other RNA
tacaaacccacctcgaaagac

SEQ ID NO: 8729 - RNA, 21 nt, synthetic construct
  misc_feature 1..21: note = Synthetic
  source 1..21: mol_type = other RNA
tacaaagtgcaaacataacaa

SEQ ID NO: 8730 - RNA, 21 nt, synthetic construct
  misc_feature 1..21: note = Synthetic
  source 1..21: mol_type = other RNA
tacaacggggacatcattctc

SEQ ID NO: 8731 - RNA, 21 nt, synthetic construct
  misc_feature 1..21: note = Synthetic
  source 1..21: mol_type = other RNA
tacaactctgaactgagaaag

SEQ ID NO: 8732 - RNA, 21 nt, synthetic construct
  misc_feature 1..21: note = Synthetic
  source 1..21: mol_type = other RNA
tacacagggccccgagaatag

SEQ ID NO: 8733 - RNA, 21 nt, synthetic construct
  misc_feature 1..21: note = Synthetic
  source 1..21: mol_type = other RNA
tacacagtgtacaactctgaa

SEQ ID NO: 8734 - RNA, 21 nt, synthetic construct
  misc_feature 1..21: note = Synthetic
  source 1..21: mol_type = other RNA
tacagcaaccagggtttgcaa

SEQ ID NO: 8735 - RNA, 21 nt, synthetic construct
  misc_feature 1..21: note = Synthetic
  source 1..21: mol_type = other RNA
tacagcgctgcggccactcat

SEQ ID NO: 8736 - RNA, 21 nt, synthetic construct
  misc_feature 1..21: note = Synthetic
  source 1..21: mol_type = other RNA
tacaggcgtgagccactgcgc

SEQ ID NO: 8737 - RNA, 21 nt, synthetic construct
  misc_feature 1..21: note = Synthetic
  source 1..21: mol_type = other RNA
tacaggcgtgaggcacctgtg

SEQ ID NO: 8738 - RNA, 21 nt, synthetic construct
  misc_feature 1..21: note = Synthetic
  source 1..21: mol_type = other RNA
tacagggacgcatttacgtgc

SEQ ID NO: 8739 - RNA, 21 nt, synthetic construct
  misc_feature 1..21: note = Synthetic
  source 1..21: mol_type = other RNA
tacaggtgcccgccaccacgc

SEQ ID NO: 8740 - RNA, 21 nt, synthetic construct
  misc_feature 1..21: note = Synthetic
  source 1..21: mol_type = other RNA
tacagtggtttaaaaagtgac

SEQ ID NO: 8741 - RNA, 21 nt, synthetic construct
  misc_feature 1..21: note = Synthetic
  source 1..21: mol_type = other RNA
tacataaagaagaggcatttc

SEQ ID NO: 8742 - RNA, 21 nt, synthetic construct
  misc_feature 1..21: note = Synthetic
  source 1..21: mol_type = other RNA
tacatacaacggggacatcat

SEQ ID NO: 8743 - RNA, 21 nt, synthetic construct
  misc_feature 1..21: note = Synthetic
  source 1..21: mol_type = other RNA
tacatgaagccatgaacagga

SEQ ID NO: 8744 - RNA, 21 nt, synthetic construct
  misc_feature 1..21: note = Synthetic
  source 1..21: mol_type = other RNA
tacccagctgatttttaactt

SEQ ID NO: 8745 - RNA, 21 nt, synthetic construct
  misc_feature 1..21: note = Synthetic
  source 1..21: mol_type = other RNA
tacccatcaacgacaagattg

SEQ ID NO: 8746 - RNA, 21 nt, synthetic construct
  misc_feature 1..21: note = Synthetic
  source 1..21: mol_type = other RNA
tacggctgtggagctgacctt

SEQ ID NO: 8747 - RNA, 21 nt, synthetic construct
  misc_feature 1..21: note = Synthetic
  source 1..21: mol_type = other RNA
tacgtgctccgaaaccagaaa

SEQ ID NO: 8748 - RNA, 21 nt, synthetic construct
  misc_feature 1..21: note = Synthetic
  source 1..21: mol_type = other RNA
tactatgttgcccaggctgga

SEQ ID NO: 8749 - RNA, 21 nt, synthetic construct
  misc_feature 1..21: note = Synthetic
  source 1..21: mol_type = other RNA
tactcgctccggtccagcgtc

SEQ ID NO: 8750 - RNA, 21 nt, synthetic construct
  misc_feature 1..21: note = Synthetic
  source 1..21: mol_type = other RNA
tactggcagccgccattgctc

SEQ ID NO: 8751 - RNA, 21 nt, synthetic construct
  misc_feature 1..21: note = Synthetic
  source 1..21: mol_type = other RNA
tactgggcttcttctcatttc

SEQ ID NO: 8752 - RNA, 21 nt, synthetic construct
  misc_feature 1..21: note = Synthetic
  source 1..21: mol_type = other RNA
tactgtccccttggaacacgt

SEQ ID NO: 8753 - RNA, 21 nt, synthetic construct
  misc_feature 1..21: note = Synthetic
  source 1..21: mol_type = other RNA
tactttgtcctcaaagacggc

SEQ ID NO: 8754 - RNA, 21 nt, synthetic construct
  misc_feature 1..21: note = Synthetic
  source 1..21: mol_type = other RNA
tagaagaggtaaacacgttga

SEQ ID NO: 8755 - RNA, 21 nt, synthetic construct
  misc_feature 1..21: note = Synthetic
  source 1..21: mol_type = other RNA
tagaaggaagacccccaggca

SEQ ID NO: 8756 - RNA, 21 nt, synthetic construct
  misc_feature 1..21: note = Synthetic
  source 1..21: mol_type = other RNA
tagaagtggaagcactaggtg

SEQ ID NO: 8757 - RNA, 21 nt, synthetic construct
  misc_feature 1..21: note = Synthetic
  source 1..21: mol_type = other RNA
tagacggggttgtcaaagttg

SEQ ID NO: 8758 - RNA, 21 nt, synthetic construct
  misc_feature 1..21: note = Synthetic
  source 1..21: mol_type = other RNA
tagagacggggtttcacgtgt

SEQ ID NO: 8759 - RNA, 21 nt, synthetic construct
  misc_feature 1..21: note = Synthetic
  source 1..21: mol_type = other RNA
tagagatgggatctcgctttg

SEQ ID NO: 8760 - RNA, 21 nt, synthetic construct
  misc_feature 1..21: note = Synthetic
  source 1..21: mol_type = other RNA
tagagattggtggatgaggca

SEQ ID NO: 8761 - RNA, 21 nt, synthetic construct
  misc_feature 1..21: note = Synthetic
  source 1..21: mol_type = other RNA
tagaggcggccactgaggaga

SEQ ID NO: 8762 - RNA, 21 nt, synthetic construct
  misc_feature 1..21: note = Synthetic
  source 1..21: mol_type = other RNA
tagatgtccacaccattcagg

SEQ ID NO: 8763 - RNA, 21 nt, synthetic construct
  misc_feature 1..21: note = Synthetic
  source 1..21: mol_type = other RNA
tagatgttgctgtggatccag

SEQ ID NO: 8764 - RNA, 21 nt, synthetic construct
  misc_feature 1..21: note = Synthetic
  source 1..21: mol_type = other RNA
tagattctattgctggccacc

SEQ ID NO: 8765 - RNA, 21 nt, synthetic construct
  misc_feature 1..21: note = Synthetic
  source 1..21: mol_type = other RNA
tagattttatatatatgtgtg

SEQ ID NO: 8766 - RNA, 21 nt, synthetic construct
  misc_feature 1..21: note = Synthetic
  source 1..21: mol_type = other RNA
tagcaaggcttgcatagaaga

SEQ ID NO: 8767 - RNA, 21 nt, synthetic construct
  misc_feature 1..21: note = Synthetic
  source 1..21: mol_type = other RNA
tagccaccctccaggttcacg

SEQ ID NO: 8768 - RNA, 21 nt, synthetic construct
  misc_feature 1..21: note = Synthetic
  source 1..21: mol_type = other RNA
tagccaggatggtctcgatct

SEQ ID NO: 8769 - RNA, 21 nt, synthetic construct
  misc_feature 1..21: note = Synthetic
  source 1..21: mol_type = other RNA
tagccatgttgcagactttgt

SEQ ID NO: 8770 - RNA, 21 nt, synthetic construct
  misc_feature 1..21: note = Synthetic
  source 1..21: mol_type = other RNA
tagccgatcttaaggtcattg

SEQ ID NO: 8771 - RNA, 21 nt, synthetic construct
  misc_feature 1..21: note = Synthetic
  source 1..21: mol_type = other RNA
tagccgtcctggttgtggcaa

SEQ ID NO: 8772 - RNA, 21 nt, synthetic construct
  misc_feature 1..21: note = Synthetic
  source 1..21: mol_type = other RNA
tagcctgacggtggatgtctc

SEQ ID NO: 8773 - RNA, 21 nt, synthetic construct
  misc_feature 1..21: note = Synthetic
  source 1..21: mol_type = other RNA
tagctcacgacagcctcaaat

SEQ ID NO: 8774 - RNA, 21 nt, synthetic construct
  misc_feature 1..21: note = Synthetic
  source 1..21: mol_type = other RNA
tagctggaaaccctggcttcc

SEQ ID NO: 8775 - RNA, 21 nt, synthetic construct
  misc_feature 1..21: note = Synthetic
  source 1..21: mol_type = other RNA
tagctgggactacaggtgccc

SEQ ID NO: 8776 - RNA, 21 nt, synthetic construct
  misc_feature 1..21: note = Synthetic
  source 1..21: mol_type = other RNA
tagctgggatcacaggcacgt

SEQ ID NO: 8777 - RNA, 21 nt, synthetic construct
  misc_feature 1..21: note = Synthetic
  source 1..21: mol_type = other RNA
tagctgtagccgtcctggttg

SEQ ID NO: 8778 - RNA, 21 nt, synthetic construct
  misc_feature 1..21: note = Synthetic
  source 1..21: mol_type = other RNA
taggaagagacgccgtgggct

SEQ ID NO: 8779 - RNA, 21 nt, synthetic construct
  misc_feature 1..21: note = Synthetic
  source 1..21: mol_type = other RNA
taggagatgcatttcccgtct

SEQ ID NO: 8780 - RNA, 21 nt, synthetic construct
  misc_feature 1..21: note = Synthetic
  source 1..21: mol_type = other RNA
taggcagtggaactcgaaggc

SEQ ID NO: 8781 - RNA, 21 nt, synthetic construct
  misc_feature 1..21: note = Synthetic
  source 1..21: mol_type = other RNA
taggcgatggagcccacagcc

SEQ ID NO: 8782 - RNA, 21 nt, synthetic construct
  misc_feature 1..21: note = Synthetic
  source 1..21: mol_type = other RNA
tagggagaggcacgctctgtc

SEQ ID NO: 8783 - RNA, 21 nt, synthetic construct
  misc_feature 1..21: note = Synthetic
  source 1..21: mol_type = other RNA
taggggtcgggaggatgggca

SEQ ID NO: 8784 - RNA, 21 nt, synthetic construct
  misc_feature 1..21: note = Synthetic
  source 1..21: mol_type = other RNA
taggggtttggcttagagatt

SEQ ID NO: 8785 - RNA, 21 nt, synthetic construct
  misc_feature 1..21: note = Synthetic
  source 1..21: mol_type = other RNA
tagggtcttcatctgttgccc

SEQ ID NO: 8786 - RNA, 21 nt, synthetic construct
  misc_feature 1..21: note = Synthetic
  source 1..21: mol_type = other RNA
tagggtgatgccattgggcca

SEQ ID NO: 8787 - RNA, 21 nt, synthetic construct
  misc_feature 1..21: note = Synthetic
  source 1..21: mol_type = other RNA
taggtgggcggacataaagac

SEQ ID NO: 8788 - RNA, 21 nt, synthetic construct
  misc_feature 1..21: note = Synthetic
  source 1..21: mol_type = other RNA
taggttttcagccaacaagtt

SEQ ID NO: 8789 - RNA, 21 nt, synthetic construct
  misc_feature 1..21: note = Synthetic
  source 1..21: mol_type = other RNA
tagtagagacggggtttcacg

SEQ ID NO: 8790 - RNA, 21 nt, synthetic construct
  misc_feature 1..21: note = Synthetic
  source 1..21: mol_type = other RNA
tagtcactgaacaaatacagc

SEQ ID NO: 8791 - RNA, 21 nt, synthetic construct
  misc_feature 1..21: note = Synthetic
  source 1..21: mol_type = other RNA
tagttgtatttctgaaatagg

SEQ ID NO: 8792 - RNA, 21 nt, synthetic construct
  misc_feature 1..21: note = Synthetic
  source 1..21: mol_type = other RNA
tataaaacaaagctctggcag

SEQ ID NO: 8793 - RNA, 21 nt, synthetic construct
  misc_feature 1..21: note = Synthetic
  source 1..21: mol_type = other RNA
tataagtgataacagtttcaa

SEQ ID NO: 8794 - RNA, 21 nt, synthetic construct
  misc_feature 1..21: note = Synthetic
  source 1..21: mol_type = other RNA
tatacaaagtgcaaacataac

SEQ ID NO: 8795 - RNA, 21 nt, synthetic construct
  misc_feature 1..21: note = Synthetic
  source 1..21: mol_type = other RNA
tatacagtggtttaaaaagtg

SEQ ID NO: 8796 - RNA, 21 nt, synthetic construct
  misc_feature 1..21: note = Synthetic
  source 1..21: mol_type = other RNA
tatagttgtatttctgaaata

SEQ ID NO: 8797 - RNA, 21 nt, synthetic construct
  misc_feature 1..21: note = Synthetic
  source 1..21: mol_type = other RNA
tatataaaacaaagctctggc

SEQ ID NO: 8798 - RNA, 21 nt, synthetic construct
  misc_feature 1..21: note = Synthetic
  source 1..21: mol_type = other RNA
tatataagtgataacagtttc

SEQ ID NO: 8799 - RNA, 21 nt, synthetic construct
  misc_feature 1..21: note = Synthetic
  source 1..21: mol_type = other RNA
tatatataagtgataacagtt

SEQ ID NO: 8800 - RNA, 21 nt, synthetic construct
  misc_feature 1..21: note = Synthetic
  source 1..21: mol_type = other RNA
tatatatataagtgataacag

SEQ ID NO: 8801 - RNA, 21 nt, synthetic construct
  misc_feature 1..21: note = Synthetic
  source 1..21: mol_type = other RNA
tatatatatataagtgataac

SEQ ID NO: 8802 - RNA, 21 nt, synthetic construct
  misc_feature 1..21: note = Synthetic
  source 1..21: mol_type = other RNA
tatatatatatataagtgata

SEQ ID NO: 8803 - RNA, 21 nt, synthetic construct
  misc_feature 1..21: note = Synthetic
  source 1..21: mol_type = other RNA
tatatatatatatataagtga

SEQ ID NO: 8804 - RNA, 21 nt, synthetic construct
  misc_feature 1..21: note = Synthetic
  source 1..21: mol_type = other RNA
tatatatatgtgtgtatatat

SEQ ID NO: 8805 - RNA, 21 nt, synthetic construct
  misc_feature 1..21: note = Synthetic
  source 1..21: mol_type = other RNA
tatatatgtgtgtatatatat

SEQ ID NO: 8806 - RNA, 21 nt, synthetic construct
  misc_feature 1..21: note = Synthetic
  source 1..21: mol_type = other RNA
tatatgtgtgtatatatatat

SEQ ID NO: 8807 - RNA, 21 nt, synthetic construct
  misc_feature 1..21: note = Synthetic
  source 1..21: mol_type = other RNA
tatcacggttccctgcactgg

SEQ ID NO: 8808 - RNA, 21 nt, synthetic construct
  misc_feature 1..21: note = Synthetic
  source 1..21: mol_type = other RNA
tatccgcaacagagacagtgc

SEQ ID NO: 8809 - RNA, 21 nt, synthetic construct
  misc_feature 1..21: note = Synthetic
  source 1..21: mol_type = other RNA
tatcctctggggacagtaggt

SEQ ID NO: 8810 - RNA, 21 nt, synthetic construct
  misc_feature 1..21: note = Synthetic
  source 1..21: mol_type = other RNA
tatccttcacgaggaaaggaa

SEQ ID NO: 8811 - RNA, 21 nt, synthetic construct
  misc_feature 1..21: note = Synthetic
  source 1..21: mol_type = other RNA
tatcgcactctttgatgggtt

SEQ ID NO: 8812 - RNA, 21 nt, synthetic construct
  misc_feature 1..21: note = Synthetic
  source 1..21: mol_type = other RNA
tatctccaccgtggtgagccc

SEQ ID NO: 8813 - RNA, 21 nt, synthetic construct
  misc_feature 1..21: note = Synthetic
  source 1..21: mol_type = other RNA
tatctgtacagggacgcattt

SEQ ID NO: 8814 - RNA, 21 nt, synthetic construct
  misc_feature 1..21: note = Synthetic
  source 1..21: mol_type = other RNA
tatctgtccaaaatactttgt

SEQ ID NO: 8815 - RNA, 21 nt, synthetic construct
  misc_feature 1..21: note = Synthetic
  source 1..21: mol_type = other RNA
tatcttcgcatcttcgctggg

SEQ ID NO: 8816 - RNA, 21 nt, synthetic construct
  misc_feature 1..21: note = Synthetic
  source 1..21: mol_type = other RNA
tatgtcgcggaggcggctccg

SEQ ID NO: 8817 - RNA, 21 nt, synthetic construct
  misc_feature 1..21: note = Synthetic
  source 1..21: mol_type = other RNA
tatgtgtgtatatatatatat

SEQ ID NO: 8818 - RNA, 21 nt, synthetic construct
  misc_feature 1..21: note = Synthetic
  source 1..21: mol_type = other RNA
tatgttgcccaggctggaaag

SEQ ID NO: 8819 - RNA, 21 nt, synthetic construct
  misc_feature 1..21: note = Synthetic
  source 1..21: mol_type = other RNA
tattaagggtgaccagtgact

SEQ ID NO: 8820 - RNA, 21 nt, synthetic construct
  misc_feature 1..21: note = Synthetic
  source 1..21: mol_type = other RNA
tattcacgatcacggctttga

SEQ ID NO: 8821 - RNA, 21 nt, synthetic construct
  misc_feature 1..21: note = Synthetic
  source 1..21: mol_type = other RNA
tattcccggtcacactgccgg

SEQ ID NO: 8822 - RNA, 21 nt, synthetic construct
  misc_feature 1..21: note = Synthetic
  source 1..21: mol_type = other RNA
tattgctggccacctccgtgt

SEQ ID NO: 8823 - RNA, 21 nt, synthetic construct
  misc_feature 1..21: note = Synthetic
  source 1..21: mol_type = other RNA
tatttatttttttatagttgt

SEQ ID NO: 8824 - RNA, 21 nt, synthetic construct
  misc_feature 1..21: note = Synthetic
  source 1..21: mol_type = other RNA
tatttctgaaatagggtcttc

SEQ ID NO: 8825 - RNA, 21 nt, synthetic construct
  misc_feature 1..21: note = Synthetic
  source 1..21: mol_type = other RNA
tatttttagtagagacggggt

SEQ ID NO: 8826 - RNA, 21 nt, synthetic construct
  misc_feature 1..21: note = Synthetic
  source 1..21: mol_type = other RNA
tatttttttatagttgtattt

SEQ ID NO: 8827 - RNA, 21 nt, synthetic construct
  misc_feature 1..21: note = Synthetic
  source 1..21: mol_type = other RNA
tcaaaacttcctggagagaaa

SEQ ID NO: 8828 - RNA, 21 nt, synthetic construct
  misc_feature 1..21: note = Synthetic
  source 1..21: mol_type = other RNA
tcaaaccatcctcccacctca

SEQ ID NO: 8829 - RNA, 21 nt, synthetic construct
  misc_feature 1..21: note = Synthetic
  source 1..21: mol_type = other RNA
tcaaacgatccagactggagg

SEQ ID NO: 8830 - RNA, 21 nt, synthetic construct
  misc_feature 1..21: note = Synthetic
  source 1..21: mol_type = other RNA
tcaaagacggccaaggagaag

SEQ ID NO: 8831 - RNA, 21 nt, synthetic construct
  misc_feature 1..21: note = Synthetic
  source 1..21: mol_type = other RNA
tcaaagttgatgctgttgatg

SEQ ID NO: 8832 - RNA, 21 nt, synthetic construct
  misc_feature 1..21: note = Synthetic
  source 1..21: mol_type = other RNA
tcaaatgcctgagctcaaacc

SEQ ID NO: 8833 - RNA, 21 nt, synthetic construct
  misc_feature 1..21: note = Synthetic
  source 1..21: mol_type = other RNA
tcaaccaatatacaaagtgca

SEQ ID NO: 8834 - RNA, 21 nt, synthetic construct
  misc_feature 1..21: note = Synthetic
  source 1..21: mol_type = other RNA
tcaacccagtagaggcggcca

SEQ ID NO: 8835 - RNA, 21 nt, synthetic construct
  misc_feature 1..21: note = Synthetic
  source 1..21: mol_type = other RNA
tcaacctcgtaaggaaccgag

SEQ ID NO: 8836 - RNA, 21 nt, synthetic construct
  misc_feature 1..21: note = Synthetic
  source 1..21: mol_type = other RNA
tcaacctgcccctctctgtcc

SEQ ID NO: 8837 - RNA, 21 nt, synthetic construct
  misc_feature 1..21: note = Synthetic
  source 1..21: mol_type = other RNA
tcaacgacaagattggggaag

SEQ ID NO: 8838 - RNA, 21 nt, synthetic construct
  misc_feature 1..21: note = Synthetic
  source 1..21: mol_type = other RNA
tcaagctgggtgctgcagatc

SEQ ID NO: 8839 - RNA, 21 nt, synthetic construct
  misc_feature 1..21: note = Synthetic
  source 1..21: mol_type = other RNA
tcaagtgatccagctcagcct

SEQ ID NO: 8840 - RNA, 21 nt, synthetic construct
  misc_feature 1..21: note = Synthetic
  source 1..21: mol_type = other RNA
tcacacagctgcccccgagac

SEQ ID NO: 8841 - RNA, 21 nt, synthetic construct
  misc_feature 1..21: note = Synthetic
  source 1..21: mol_type = other RNA
tcacaccagttcactcctctt

SEQ ID NO: 8842 - RNA, 21 nt, synthetic construct
  misc_feature 1..21: note = Synthetic
  source 1..21: mol_type = other RNA
tcacaccattctcctgcctca

SEQ ID NO: 8843 - RNA, 21 nt, synthetic construct
  misc_feature 1..21: note = Synthetic
  source 1..21: mol_type = other RNA
tcacactgccggctgccatgg

SEQ ID NO: 8844 - RNA, 21 nt, synthetic construct
  misc_feature 1..21: note = Synthetic
  source 1..21: mol_type = other RNA
tcacactggcacttgtagcca

SEQ ID NO: 8845 - RNA, 21 nt, synthetic construct
  misc_feature 1..21: note = Synthetic
  source 1..21: mol_type = other RNA
tcacagacgaactgccgagag

SEQ ID NO: 8846 - RNA, 21 nt, synthetic construct
  misc_feature 1..21: note = Synthetic
  source 1..21: mol_type = other RNA
tcacagcgccagctggagtgg

SEQ ID NO: 8847 - RNA, 21 nt, synthetic construct
  misc_feature 1..21: note = Synthetic
  source 1..21: mol_type = other RNA
tcacaggcacgtgccaccgta

SEQ ID NO: 8848 - RNA, 21 nt, synthetic construct
  misc_feature 1..21: note = Synthetic
  source 1..21: mol_type = other RNA
tcacagtaagacattcaggct

SEQ ID NO: 8849 - RNA, 21 nt, synthetic construct
  misc_feature 1..21: note = Synthetic
  source 1..21: mol_type = other RNA
tcacattaacgcagccaactt

SEQ ID NO: 8850 - RNA, 21 nt, synthetic construct
  misc_feature 1..21: note = Synthetic
  source 1..21: mol_type = other RNA
tcaccagcgagtagatgtcca

SEQ ID NO: 8851 - RNA, 21 nt, synthetic construct
  misc_feature 1..21: note = Synthetic
  source 1..21: mol_type = other RNA
tcaccgtgcatgttttaaaca

SEQ ID NO: 8852 - RNA, 21 nt, synthetic construct
  misc_feature 1..21: note = Synthetic
  source 1..21: mol_type = other RNA
tcacgacagcctcaaatgcct

SEQ ID NO: 8853 - RNA, 21 nt, synthetic construct
  misc_feature 1..21: note = Synthetic
  source 1..21: mol_type = other RNA
tcacgacctgctgtgtcctag

SEQ ID NO: 8854 - RNA, 21 nt, synthetic construct
  misc_feature 1..21: note = Synthetic
  source 1..21: mol_type = other RNA
tcacgaggaaaggaagaaacc

SEQ ID NO: 8855 - RNA, 21 nt, synthetic construct
  misc_feature 1..21: note = Synthetic
  source 1..21: mol_type = other RNA
tcacgatcacggctttgaagt

SEQ ID NO: 8856 - RNA, 21 nt, synthetic construct
  misc_feature 1..21: note = Synthetic
  source 1..21: mol_type = other RNA
tcacgcagagctggctgcagg

SEQ ID NO: 8857 - RNA, 21 nt, synthetic construct
  misc_feature 1..21: note = Synthetic
  source 1..21: mol_type = other RNA
tcacgccacgtcatcctccag

SEQ ID NO: 8858 - RNA, 21 nt, synthetic construct
  misc_feature 1..21: note = Synthetic
  source 1..21: mol_type = other RNA
tcacgcccttggtatccgcaa

SEQ ID NO: 8859 - RNA, 21 nt, synthetic construct
  misc_feature 1..21: note = Synthetic
  source 1..21: mol_type = other RNA
tcacgcgggagtctgacggag

SEQ ID NO: 8860 - RNA, 21 nt, synthetic construct
  misc_feature 1..21: note = Synthetic
  source 1..21: mol_type = other RNA
tcacgctactgggcttcttct

SEQ ID NO: 8861 - RNA, 21 nt, synthetic construct
  misc_feature 1..21: note = Synthetic
  source 1..21: mol_type = other RNA
tcacggccaaggtaaccgggt

SEQ ID NO: 8862 - RNA, 21 nt, synthetic construct
  misc_feature 1..21: note = Synthetic
  source 1..21: mol_type = other RNA
tcacggctttgaagtcccggt

SEQ ID NO: 8863 - RNA, 21 nt, synthetic construct
  misc_feature 1..21: note = Synthetic
  source 1..21: mol_type = other RNA
tcacggtggagagaaactcaa

SEQ ID NO: 8864 - RNA, 21 nt, synthetic construct
  misc_feature 1..21: note = Synthetic
  source 1..21: mol_type = other RNA
tcacggttccctgcactgggg

SEQ ID NO: 8865 - RNA, 21 nt, synthetic construct
  misc_feature 1..21: note = Synthetic
  source 1..21: mol_type = other RNA
tcacgtgttagccaggatggt

SEQ ID NO: 8866 - RNA, 21 nt, synthetic construct
  misc_feature 1..21: note = Synthetic
  source 1..21: mol_type = other RNA
tcactatctccaccgtggtga

SEQ ID NO: 8867 - RNA, 21 nt, synthetic construct
  misc_feature 1..21: note = Synthetic
  source 1..21: mol_type = other RNA
tcactcctcttggctgggtga

SEQ ID NO: 8868 - RNA, 21 nt, synthetic construct
  misc_feature 1..21: note = Synthetic
  source 1..21: mol_type = other RNA
tcactgaacaaatacagcaac

SEQ ID NO: 8869 - RNA, 21 nt, synthetic construct
  misc_feature 1..21: note = Synthetic
  source 1..21: mol_type = other RNA
tcactgcaacctccacctcct

SEQ ID NO: 8870 - RNA, 21 nt, synthetic construct
  misc_feature 1..21: note = Synthetic
  source 1..21: mol_type = other RNA
tcactgcaagctccgcttccc

SEQ ID NO: 8871 - RNA, 21 nt, synthetic construct
  misc_feature 1..21: note = Synthetic
  source 1..21: mol_type = other RNA
tcactgtctctccggacatca

SEQ ID NO: 8872 - RNA, 21 nt, synthetic construct
  misc_feature 1..21: note = Synthetic
  source 1..21: mol_type = other RNA
tcagaaagaacctgaagtccc

SEQ ID NO: 8873 - RNA, 21 nt, synthetic construct
  misc_feature 1..21: note = Synthetic
  source 1..21: mol_type = other RNA
tcagacagccttgctcgtctg

SEQ ID NO: 8874 - RNA, 21 nt, synthetic construct
  misc_feature 1..21: note = Synthetic
  source 1..21: mol_type = other RNA
tcagaccagtagattctattg

SEQ ID NO: 8875 - RNA, 21 nt, synthetic construct
  misc_feature 1..21: note = Synthetic
  source 1..21: mol_type = other RNA
tcagagcactggaattcgtca

SEQ ID NO: 8876 - RNA, 21 nt, synthetic construct
  misc_feature 1..21: note = Synthetic
  source 1..21: mol_type = other RNA
tcagagccatcctggcactca

SEQ ID NO: 8877 - RNA, 21 nt, synthetic construct
  misc_feature 1..21: note = Synthetic
  source 1..21: mol_type = other RNA
tcagaggcaataaccccctac

SEQ ID NO: 8878 - RNA, 21 nt, synthetic construct
  misc_feature 1..21: note = Synthetic
  source 1..21: mol_type = other RNA
tcagatttgtccttgcagtcg

SEQ ID NO: 8879 - RNA, 21 nt, synthetic construct
  misc_feature 1..21: note = Synthetic
  source 1..21: mol_type = other RNA
tcagccaacaagttgacatcg

SEQ ID NO: 8880 - RNA, 21 nt, synthetic construct
  misc_feature 1..21: note = Synthetic
  source 1..21: mol_type = other RNA
tcagccagatcatttccgacg

SEQ ID NO: 8881 - RNA, 21 nt, synthetic construct
  misc_feature 1..21: note = Synthetic
  source 1..21: mol_type = other RNA
tcagcctcccaaagtgctggg

SEQ ID NO: 8882 - RNA, 21 nt, synthetic construct
  misc_feature 1..21: note = Synthetic
  source 1..21: mol_type = other RNA
tcagcctcccaagtagctggg

SEQ ID NO: 8883 - RNA, 21 nt, synthetic construct
  misc_feature 1..21: note = Synthetic
  source 1..21: mol_type = other RNA
tcagcctcccgagtagctggg

SEQ ID NO: 8884 - RNA, 21 nt, synthetic construct
  misc_feature 1..21: note = Synthetic
  source 1..21: mol_type = other RNA
tcagcctcgccatgcctggcc

SEQ ID NO: 8885 - RNA, 21 nt, synthetic construct
  misc_feature 1..21: note = Synthetic
  source 1..21: mol_type = other RNA
tcagcctctcttggctgggtg

SEQ ID NO: 8886 - RNA, 21 nt, synthetic construct
  misc_feature 1..21: note = Synthetic
  source 1..21: mol_type = other RNA
tcagcctctgtgaggcagctc

SEQ ID NO: 8887 - RNA, 21 nt, synthetic construct
  misc_feature 1..21: note = Synthetic
  source 1..21: mol_type = other RNA
tcagcgctgccatcgcagacc

SEQ ID NO: 8888 - RNA, 21 nt, synthetic construct
  misc_feature 1..21: note = Synthetic
  source 1..21: mol_type = other RNA
tcaggaagggttctgggcagg

SEQ ID NO: 8889 - RNA, 21 nt, synthetic construct
  misc_feature 1..21: note = Synthetic
  source 1..21: mol_type = other RNA
tcaggcacttaataaatatta

SEQ ID NO: 8890 - RNA, 21 nt, synthetic construct
  misc_feature 1..21: note = Synthetic
  source 1..21: mol_type = other RNA
tcaggccccctttcttgatct

SEQ ID NO: 8891 - RNA, 21 nt, synthetic construct
  misc_feature 1..21: note = Synthetic
  source 1..21: mol_type = other RNA
tcaggcctggtctccaactcc

SEQ ID NO: 8892 - RNA, 21 nt, synthetic construct
  misc_feature 1..21: note = Synthetic
  source 1..21: mol_type = other RNA
tcaggcgatcctcctgcctca

SEQ ID NO: 8893 - RNA, 21 nt, synthetic construct
  misc_feature 1..21: note = Synthetic
  source 1..21: mol_type = other RNA
tcaggctacaaaaaccttcta

SEQ ID NO: 8894 - RNA, 21 nt, synthetic construct
  misc_feature 1..21: note = Synthetic
  source 1..21: mol_type = other RNA
tcaggctctgcctctgggaag

SEQ ID NO: 8895 - RNA, 21 nt, synthetic construct
  misc_feature 1..21: note = Synthetic
  source 1..21: mol_type = other RNA
tcagggcgacaggtggccaca

SEQ ID NO: 8896 - RNA, 21 nt, synthetic construct
  misc_feature 1..21: note = Synthetic
  source 1..21: mol_type = other RNA
tcagggtggtcctctcacacc

SEQ ID NO: 8897 - RNA, 21 nt, synthetic construct
  misc_feature 1..21: note = Synthetic
  source 1..21: mol_type = other RNA
tcaggttggggatgaggctgg

SEQ ID NO: 8898 - RNA, 21 nt, synthetic construct
  misc_feature 1..21: note = Synthetic
  source 1..21: mol_type = other RNA
tcagtcaccagcgagtagatg

SEQ ID NO: 8899 - RNA, 21 nt, synthetic construct
  misc_feature 1..21: note = Synthetic
  source 1..21: mol_type = other RNA
tcagtccagtacatgaagcca

SEQ ID NO: 8900 - RNA, 21 nt, synthetic construct
  misc_feature 1..21: note = Synthetic
  source 1..21: mol_type = other RNA
tcagtgcaacagtaacacggc

SEQ ID NO: 8901 - RNA, 21 nt, synthetic construct
  misc_feature 1..21: note = Synthetic
  source 1..21: mol_type = other RNA
tcatacatacaacggggacat

SEQ ID NO: 8902 - RNA, 21 nt, synthetic construct
  misc_feature 1..21: note = Synthetic
  source 1..21: mol_type = other RNA
tcatagctcacgacagcctca

SEQ ID NO: 8903 - RNA, 21 nt, synthetic construct
  misc_feature 1..21: note = Synthetic
  source 1..21: mol_type = other RNA
tcataggaagagacgccgtgg

SEQ ID NO: 8904 - RNA, 21 nt, synthetic construct
  misc_feature 1..21: note = Synthetic
  source 1..21: mol_type = other RNA
tcatattcccggtcacactgc

SEQ ID NO: 8905 - RNA, 21 nt, synthetic construct
  misc_feature 1..21: note = Synthetic
  source 1..21: mol_type = other RNA
tcatcagagccatcctggcac

SEQ ID NO: 8906 - RNA, 21 nt, synthetic construct
  misc_feature 1..21: note = Synthetic
  source 1..21: mol_type = other RNA
tcatccgagccatcttcgcag

SEQ ID NO: 8907 - RNA, 21 nt, synthetic construct
  misc_feature 1..21: note = Synthetic
  source 1..21: mol_type = other RNA
tcatcctccaagatggtcttc

SEQ ID NO: 8908 - RNA, 21 nt, synthetic construct
  misc_feature 1..21: note = Synthetic
  source 1..21: mol_type = other RNA
tcatcctccagactgaccatc

SEQ ID NO: 8909 - RNA, 21 nt, synthetic construct
  misc_feature 1..21: note = Synthetic
  source 1..21: mol_type = other RNA
tcatcctctgtggtcttctga

SEQ ID NO: 8910 - RNA, 21 nt, synthetic construct
  misc_feature 1..21: note = Synthetic
  source 1..21: mol_type = other RNA
tcatcctggtccccccgggcc

SEQ ID NO: 8911 - RNA, 21 nt, synthetic construct
  misc_feature 1..21: note = Synthetic
  source 1..21: mol_type = other RNA
tcatcgatatcgcactctttg

SEQ ID NO: 8912 - RNA, 21 nt, synthetic construct
  misc_feature 1..21: note = Synthetic
  source 1..21: mol_type = other RNA
tcatcgatatcttcgcatctt

SEQ ID NO: 8913 - RNA, 21 nt, synthetic construct
  misc_feature 1..21: note = Synthetic
  source 1..21: mol_type = other RNA
tcatcgctcatgtccttgcag

SEQ ID NO: 8914 - RNA, 21 nt, synthetic construct
  misc_feature 1..21: note = Synthetic
  source 1..21: mol_type = other RNA
tcatctgaccagtcccggcag

SEQ ID NO: 8915 - RNA, 21 nt, synthetic construct
  misc_feature 1..21: note = Synthetic
  source 1..21: mol_type = other RNA
tcatctgttgcccaggctgga

SEQ ID NO: 8916 - RNA, 21 nt, synthetic construct
  misc_feature 1..21: note = Synthetic
  source 1..21: mol_type = other RNA
tcatcttccatgtttgaggat

SEQ ID NO: 8917 - RNA, 21 nt, synthetic construct
  misc_feature 1..21: note = Synthetic
  source 1..21: mol_type = other RNA
tcatcttcctgacctcgtgcc

SEQ ID NO: 8918 - RNA, 21 nt, synthetic construct
  misc_feature 1..21: note = Synthetic
  source 1..21: mol_type = other RNA
tcatgatccacccgcctcggc

SEQ ID NO: 8919 - RNA, 21 nt, synthetic construct
  misc_feature 1..21: note = Synthetic
  source 1..21: mol_type = other RNA
tcatgattcgggggtgacagg

SEQ ID NO: 8920 - RNA, 21 nt, synthetic construct
  misc_feature 1..21: note = Synthetic
  source 1..21: mol_type = other RNA
tcatggctcactgcaacctcc

SEQ ID NO: 8921 - RNA, 21 nt, synthetic construct
  misc_feature 1..21: note = Synthetic
  source 1..21: mol_type = other RNA
tcatgtccctggccagcagca

SEQ ID NO: 8922 - RNA, 21 nt, synthetic construct
  misc_feature 1..21: note = Synthetic
  source 1..21: mol_type = other RNA
tcatgtccttgcagtcatatt

SEQ ID NO: 8923 - RNA, 21 nt, synthetic construct
  misc_feature 1..21: note = Synthetic
  source 1..21: mol_type = other RNA
tcattctcccaaaaagcgttg

SEQ ID NO: 8924 - RNA, 21 nt, synthetic construct
  misc_feature 1..21: note = Synthetic
  source 1..21: mol_type = other RNA
tcattctctgggacaggtcag

SEQ ID NO: 8925 - RNA, 21 nt, synthetic construct
  misc_feature 1..21: note = Synthetic
  source 1..21: mol_type = other RNA
tcattgacacgggctttccct

SEQ ID NO: 8926 - RNA, 21 nt, synthetic construct
  misc_feature 1..21: note = Synthetic
  source 1..21: mol_type = other RNA
tcattgcagacgtgggaacag

SEQ ID NO: 8927 - RNA, 21 nt, synthetic construct
  misc_feature 1..21: note = Synthetic
  source 1..21: mol_type = other RNA
tcatttaagaaatttaattga

SEQ ID NO: 8928 - RNA, 21 nt, synthetic construct
  misc_feature 1..21: note = Synthetic
  source 1..21: mol_type = other RNA
tcatttccgacgccatgaatc

SEQ ID NO: 8929 - RNA, 21 nt, synthetic construct
  misc_feature 1..21: note = Synthetic
  source 1..21: mol_type = other RNA
tcatttcctctgccagcaacg

SEQ ID NO: 8930 - RNA, 21 nt, synthetic construct
  misc_feature 1..21: note = Synthetic
  source 1..21: mol_type = other RNA
tcatttggtgaatgagtttgg

SEQ ID NO: 8931 - RNA, 21 nt, synthetic construct
  misc_feature 1..21: note = Synthetic
  source 1..21: mol_type = other RNA
tcattttttaagagatggggt

SEQ ID NO: 8932 - RNA, 21 nt, synthetic construct
  misc_feature 1..21: note = Synthetic
  source 1..21: mol_type = other RNA
tccaaaatactttgtcctcaa

SEQ ID NO: 8933 - RNA, 21 nt, synthetic construct
  misc_feature 1..21: note = Synthetic
  source 1..21: mol_type = other RNA
tccaactcctgaactcaagtg

SEQ ID NO: 8934 - RNA, 21 nt, synthetic construct
  misc_feature 1..21: note = Synthetic
  source 1..21: mol_type = other RNA
tccaagatggtcttccggttg

SEQ ID NO: 8935 - RNA, 21 nt, synthetic construct
  misc_feature 1..21: note = Synthetic
  source 1..21: mol_type = other RNA
tccaagcagtcccggtctgag

SEQ ID NO: 8936 - RNA, 21 nt, synthetic construct
  misc_feature 1..21: note = Synthetic
  source 1..21: mol_type = other RNA
tccaagcattcgttggtcccg

SEQ ID NO: 8937 - RNA, 21 nt, synthetic construct
  misc_feature 1..21: note = Synthetic
  source 1..21: mol_type = other RNA
tccacaccattcaggccccct

SEQ ID NO: 8938 - RNA, 21 nt, synthetic construct
  misc_feature 1..21: note = Synthetic
  source 1..21: mol_type = other RNA
tccacagccagcccgtcgggg

SEQ ID NO: 8939 - RNA, 21 nt, synthetic construct
  misc_feature 1..21: note = Synthetic
  source 1..21: mol_type = other RNA
tccaccacgatggcccttggc

SEQ ID NO: 8940 - RNA, 21 nt, synthetic construct
  misc_feature 1..21: note = Synthetic
  source 1..21: mol_type = other RNA
tccacccgcctcggcctccca

SEQ ID NO: 8941 - RNA, 21 nt, synthetic construct
  misc_feature 1..21: note = Synthetic
  source 1..21: mol_type = other RNA
tccaccgtggtgagcccaggg

SEQ ID NO: 8942 - RNA, 21 nt, synthetic construct
  misc_feature 1..21: note = Synthetic
  source 1..21: mol_type = other RNA
tccacctcctgggctcaggcg

SEQ ID NO: 8943 - RNA, 21 nt, synthetic construct
  misc_feature 1..21: note = Synthetic
  source 1..21: mol_type = other RNA
tccacttggccatcgcacctc

SEQ ID NO: 8944 - RNA, 21 nt, synthetic construct
  misc_feature 1..21: note = Synthetic
  source 1..21: mol_type = other RNA
tccagaactgaggaatgcagc

SEQ ID NO: 8945 - RNA, 21 nt, synthetic construct
  misc_feature 1..21: note = Synthetic
  source 1..21: mol_type = other RNA
tccagactgaccatcgagggg

SEQ ID NO: 8946 - RNA, 21 nt, synthetic construct
  misc_feature 1..21: note = Synthetic
  source 1..21: mol_type = other RNA
tccagactgaccatctgtctc

SEQ ID NO: 8947 - RNA, 21 nt, synthetic construct
  misc_feature 1..21: note = Synthetic
  source 1..21: mol_type = other RNA
tccagactggaggatttattt

SEQ ID NO: 8948 - RNA, 21 nt, synthetic construct
  misc_feature 1..21: note = Synthetic
  source 1..21: mol_type = other RNA
tccagagcgaccacgttcctc

SEQ ID NO: 8949 - RNA, 21 nt, synthetic construct
  misc_feature 1..21: note = Synthetic
  source 1..21: mol_type = other RNA
tccagccccagggccccatgc

SEQ ID NO: 8950 - RNA, 21 nt, synthetic construct
  misc_feature 1..21: note = Synthetic
  source 1..21: mol_type = other RNA
tccagcgcaatttccagcccc

SEQ ID NO: 8951 - RNA, 21 nt, synthetic construct
  misc_feature 1..21: note = Synthetic
  source 1..21: mol_type = other RNA
tccagcgtcatcttcctgacc

SEQ ID NO: 8952 - RNA, 21 nt, synthetic construct
  misc_feature 1..21: note = Synthetic
  source 1..21: mol_type = other RNA
tccagctcagcctcccaaagt

SEQ ID NO: 8953 - RNA, 21 nt, synthetic construct
  misc_feature 1..21: note = Synthetic
  source 1..21: mol_type = other RNA
tccagctggaagccttcctca

SEQ ID NO: 8954 - RNA, 21 nt, synthetic construct
  misc_feature 1..21: note = Synthetic
  source 1..21: mol_type = other RNA
tccaggcagatgttcacgcca

SEQ ID NO: 8955 - RNA, 21 nt, synthetic construct
  misc_feature 1..21: note = Synthetic
  source 1..21: mol_type = other RNA
tccagggtgatgcattcgccg

SEQ ID NO: 8956 - RNA, 21 nt, synthetic construct
  misc_feature 1..21: note = Synthetic
  source 1..21: mol_type = other RNA
tccaggttcacgcagagctgg

SEQ ID NO: 8957 - RNA, 21 nt, synthetic construct
  misc_feature 1..21: note = Synthetic
  source 1..21: mol_type = other RNA
tccagtacatgaagccatgaa

SEQ ID NO: 8958 - RNA, 21 nt, synthetic construct
  misc_feature 1..21: note = Synthetic
  source 1..21: mol_type = other RNA
tccagtagatgttgctgtgga

SEQ ID NO: 8959 - RNA, 21 nt, synthetic construct
  misc_feature 1..21: note = Synthetic
  source 1..21: mol_type = other RNA
tccagtccacagccagcccgt

SEQ ID NO: 8960 - RNA, 21 nt, synthetic construct
  misc_feature 1..21: note = Synthetic
  source 1..21: mol_type = other RNA
tccagttcgtgcaaataatct

SEQ ID NO: 8961 - RNA, 21 nt, synthetic construct
  misc_feature 1..21: note = Synthetic
  source 1..21: mol_type = other RNA
tccatagaaggaagaccccca

SEQ ID NO: 8962 - RNA, 21 nt, synthetic construct
  misc_feature 1..21: note = Synthetic
  source 1..21: mol_type = other RNA
tccatcagagcactggaattc

SEQ ID NO: 8963 - RNA, 21 nt, synthetic construct
  misc_feature 1..21: note = Synthetic
  source 1..21: mol_type = other RNA
tccatgtttgaggattgtgtc

SEQ ID NO: 8964 - RNA, 21 nt, synthetic construct
  misc_feature 1..21: note = Synthetic
  source 1..21: mol_type = other RNA
tcccaaaaagcgttgcacaca

SEQ ID NO: 8965 - RNA, 21 nt, synthetic construct
  misc_feature 1..21: note = Synthetic
  source 1..21: mol_type = other RNA
tcccaaagtgctgggattaca

SEQ ID NO: 8966 - RNA, 21 nt, synthetic construct
  misc_feature 1..21: note = Synthetic
  source 1..21: mol_type = other RNA
tcccaacacacacgacagaaa

SEQ ID NO: 8967 - RNA, 21 nt, synthetic construct
  misc_feature 1..21: note = Synthetic
  source 1..21: mol_type = other RNA
tcccaacccaagccattgcat

SEQ ID NO: 8968 - RNA, 21 nt, synthetic construct
  misc_feature 1..21: note = Synthetic
  source 1..21: mol_type = other RNA
tcccaagtagctgggatcaca

SEQ ID NO: 8969 - RNA, 21 nt, synthetic construct
  misc_feature 1..21: note = Synthetic
  source 1..21: mol_type = other RNA
tcccacctcagcctcgccatg

SEQ ID NO: 8970 - RNA, 21 nt, synthetic construct
  misc_feature 1..21: note = Synthetic
  source 1..21: mol_type = other RNA
tcccagaagccactcatacat

SEQ ID NO: 8971 - RNA, 21 nt, synthetic construct
  misc_feature 1..21: note = Synthetic
  source 1..21: mol_type = other RNA
tcccagatgaataaatatata

SEQ ID NO: 8972 - RNA, 21 nt, synthetic construct
  misc_feature 1..21: note = Synthetic
  source 1..21: mol_type = other RNA
tcccatcccaacacacacgac

SEQ ID NO: 8973 - RNA, 21 nt, synthetic construct
  misc_feature 1..21: note = Synthetic
  source 1..21: mol_type = other RNA
tcccatcgtggcagcgaaact

SEQ ID NO: 8974 - RNA, 21 nt, synthetic construct
  misc_feature 1..21: note = Synthetic
  source 1..21: mol_type = other RNA
tccccactatctgtacaggga

SEQ ID NO: 8975 - RNA, 21 nt, synthetic construct
  misc_feature 1..21: note = Synthetic
  source 1..21: mol_type = other RNA
tccccagtcagtccagtacat

SEQ ID NO: 8976 - RNA, 21 nt, synthetic construct
  misc_feature 1..21: note = Synthetic
  source 1..21: mol_type = other RNA
tccccccgggcctgtttctct

SEQ ID NO: 8977 - RNA, 21 nt, synthetic construct
  misc_feature 1..21: note = Synthetic
  source 1..21: mol_type = other RNA
tccccgccgcggcgaggagca

SEQ ID NO: 8978 - RNA, 21 nt, synthetic construct
  misc_feature 1..21: note = Synthetic
  source 1..21: mol_type = other RNA
tccccggatttgcaggtgaca

SEQ ID NO: 8979 - RNA, 21 nt, synthetic construct
  misc_feature 1..21: note = Synthetic
  source 1..21: mol_type = other RNA
tccccggcattcattgacacg

SEQ ID NO: 8980 - RNA, 21 nt, synthetic construct
  misc_feature 1..21: note = Synthetic
  source 1..21: mol_type = other RNA
tcccctcccctttcatcttcc

SEQ ID NO: 8981 - RNA, 21 nt, synthetic construct
  misc_feature 1..21: note = Synthetic
  source 1..21: mol_type = other RNA
tccccttggaacacgtaaaga

SEQ ID NO: 8982 - RNA, 21 nt, synthetic construct
  misc_feature 1..21: note = Synthetic
  source 1..21: mol_type = other RNA
tcccctttcatcttccatgtt

SEQ ID NO: 8983 - RNA, 21 nt, synthetic construct
  misc_feature 1..21: note = Synthetic
  source 1..21: mol_type = other RNA
tcccgacccggatcacgacct

SEQ ID NO: 8984 - RNA, 21 nt, synthetic construct
  misc_feature 1..21: note = Synthetic
  source 1..21: mol_type = other RNA
tcccgagtagctgggactaca

SEQ ID NO: 8985 - RNA, 21 nt, synthetic construct
  misc_feature 1..21: note = Synthetic
  source 1..21: mol_type = other RNA
tcccgcactctttgatgggtt

SEQ ID NO: 8986 - RNA, 21 nt, synthetic construct
  misc_feature 1..21: note = Synthetic
  source 1..21: mol_type = other RNA
tcccggcagtctctagccatg

SEQ ID NO: 8987 - RNA, 21 nt, synthetic construct
  misc_feature 1..21: note = Synthetic
  source 1..21: mol_type = other RNA
tcccgggttcacaccattctc

SEQ ID NO: 8988 - RNA, 21 nt, synthetic construct
  misc_feature 1..21: note = Synthetic
  source 1..21: mol_type = other RNA
tcccggtcaacctgcccctct

SEQ ID NO: 8989 - RNA, 21 nt, synthetic construct
  misc_feature 1..21: note = Synthetic
  source 1..21: mol_type = other RNA
tcccggtcacactgccggctg

SEQ ID NO: 8990 - RNA, 21 nt, synthetic construct
  misc_feature 1..21: note = Synthetic
  source 1..21: mol_type = other RNA
tcccggtctgagtcacagacg

SEQ ID NO: 8991 - RNA, 21 nt, synthetic construct
  misc_feature 1..21: note = Synthetic
  source 1..21: mol_type = other RNA
tcccgtcaaacgatccagact

SEQ ID NO: 8992 - RNA, 21 nt, synthetic construct
  misc_feature 1..21: note = Synthetic
  source 1..21: mol_type = other RNA
tcccgtcttggcactggaact

SEQ ID NO: 8993 - RNA, 21 nt, synthetic construct
  misc_feature 1..21: note = Synthetic
  source 1..21: mol_type = other RNA
tcccgttggtgccatctgctg

SEQ ID NO: 8994 - RNA, 21 nt, synthetic construct
  misc_feature 1..21: note = Synthetic
  source 1..21: mol_type = other RNA
tccctcgcagagtgtcacatt

SEQ ID NO: 8995 - RNA, 21 nt, synthetic construct
  misc_feature 1..21: note = Synthetic
  source 1..21: mol_type = other RNA
tccctcgcagagtgtcagaca

SEQ ID NO: 8996 - RNA, 21 nt, synthetic construct
  misc_feature 1..21: note = Synthetic
  source 1..21: mol_type = other RNA
tccctgaataacgttttcctc

SEQ ID NO: 8997 - RNA, 21 nt, synthetic construct
  misc_feature 1..21: note = Synthetic
  source 1..21: mol_type = other RNA
tccctgcactgggggggacac

SEQ ID NO: 8998 - RNA, 21 nt, synthetic construct
  misc_feature 1..21: note = Synthetic
  source 1..21: mol_type = other RNA
tccctggccagcagcatgccg

SEQ ID NO: 8999 - RNA, 21 nt, synthetic construct
  misc_feature 1..21: note = Synthetic
  source 1..21: mol_type = other RNA
tccctggcctgggatcccatc

SEQ ID NO: 9000 - RNA, 21 nt, synthetic construct
  misc_feature 1..21: note = Synthetic
  source 1..21: mol_type = other RNA
tccctggggacaattgccaat

SEQ ID NO: 9001 - RNA, 21 nt, synthetic construct
  misc_feature 1..21: note = Synthetic
  source 1..21: mol_type = other RNA
tcccttgtgacatcttcacgc

SEQ ID NO: 9002 - RNA, 21 nt, synthetic construct
  misc_feature 1..21: note = Synthetic
  source 1..21: mol_type = other RNA
tccctttcctggcttaaggaa

SEQ ID NO: 9003 - RNA, 21 nt, synthetic construct
  misc_feature 1..21: note = Synthetic
  source 1..21: mol_type = other RNA
tccgaaaccagaaaggcttat

SEQ ID NO: 9004 - RNA, 21 nt, synthetic construct
  misc_feature 1..21: note = Synthetic
  source 1..21: mol_type = other RNA
tccgaagcctgttctgcctcc

SEQ ID NO: 9005 - RNA, 21 nt, synthetic construct
  misc_feature 1..21: note = Synthetic
  source 1..21: mol_type = other RNA
tccgacgccatgaatcccttt

SEQ ID NO: 9006 - RNA, 21 nt, synthetic construct
  misc_feature 1..21: note = Synthetic
  source 1..21: mol_type = other RNA
tccgagccatcttcgcagtcg

SEQ ID NO: 9007 - RNA, 21 nt, synthetic construct
  misc_feature 1..21: note = Synthetic
  source 1..21: mol_type = other RNA
tccgcaacagagacagtgccc

SEQ ID NO: 9008 - RNA, 21 nt, synthetic construct
  misc_feature 1..21: note = Synthetic
  source 1..21: mol_type = other RNA
tccgcttcccgggttcacacc

SEQ ID NO: 9009 - RNA, 21 nt, synthetic construct
  misc_feature 1..21: note = Synthetic
  source 1..21: mol_type = other RNA
tccggacatcagtgcaacagt

SEQ ID NO: 9010 - RNA, 21 nt, synthetic construct
  misc_feature 1..21: note = Synthetic
  source 1..21: mol_type = other RNA
tccgggcaggcgcaggtaaac

SEQ ID NO: 9011 - RNA, 21 nt, synthetic construct
  misc_feature 1..21: note = Synthetic
  source 1..21: mol_type = other RNA
tccggggacccgggacttgtc

SEQ ID NO: 9012 - RNA, 21 nt, synthetic construct
  misc_feature 1..21: note = Synthetic
  source 1..21: mol_type = other RNA
tccggtccagcgtcatcttcc

SEQ ID NO: 9013 - RNA, 21 nt, synthetic construct
  misc_feature 1..21: note = Synthetic
  source 1..21: mol_type = other RNA
tccggttgcccccgttgacat

SEQ ID NO: 9014 - RNA, 21 nt, synthetic construct
  misc_feature 1..21: note = Synthetic
  source 1..21: mol_type = other RNA
tccgtggcgatggggaggaca

SEQ ID NO: 9015 - RNA, 21 nt, synthetic construct
  misc_feature 1..21: note = Synthetic
  source 1..21: mol_type = other RNA
tccgtgtccagagcgaccacg

SEQ ID NO: 9016 - RNA, 21 nt, synthetic construct
  misc_feature 1..21: note = Synthetic
  source 1..21: mol_type = other RNA
tcctagctggaaaccctggct

SEQ ID NO: 9017 - RNA, 21 nt, synthetic construct
  misc_feature 1..21: note = Synthetic
  source 1..21: mol_type = other RNA
tcctcaaagacggccaaggag

SEQ ID NO: 9018 - RNA, 21 nt, synthetic construct
  misc_feature 1..21: note = Synthetic
  source 1..21: mol_type = other RNA
tcctcacactggcacttgtag

SEQ ID NO: 9019 - RNA, 21 nt, synthetic construct
  misc_feature 1..21: note = Synthetic
  source 1..21: mol_type = other RNA
tcctcacggccaaggtaaccg

SEQ ID NO: 9020 - RNA, 21 nt, synthetic construct
  misc_feature 1..21: note = Synthetic
  source 1..21: mol_type = other RNA
tcctcaggttggggatgaggc

SEQ ID NO: 9021 - RNA, 21 nt, synthetic construct
  misc_feature 1..21: note = Synthetic
  source 1..21: mol_type = other RNA
tcctcatgtccctggccagca

SEQ ID NO: 9022 - RNA, 21 nt, synthetic construct
  misc_feature 1..21: note = Synthetic
  source 1..21: mol_type = other RNA
tcctccaagatggtcttccgg

SEQ ID NO: 9023 - RNA, 21 nt, synthetic construct
  misc_feature 1..21: note = Synthetic
  source 1..21: mol_type = other RNA
tcctccagactgaccatcgag

SEQ ID NO: 9024 - RNA, 21 nt, synthetic construct
  misc_feature 1..21: note = Synthetic
  source 1..21: mol_type = other RNA
tcctccagactgaccatctgt

SEQ ID NO: 9025 - RNA, 21 nt, synthetic construct
  misc_feature 1..21: note = Synthetic
  source 1..21: mol_type = other RNA
tcctcccacctcagcctcgcc

SEQ ID NO: 9026 - RNA, 21 nt, synthetic construct
  misc_feature 1..21: note = Synthetic
  source 1..21: mol_type = other RNA
tcctcctgcctcagcctccca

SEQ ID NO: 9027 - RNA, 21 nt, synthetic construct
  misc_feature 1..21: note = Synthetic
  source 1..21: mol_type = other RNA
tcctcgtcagatttgtccttg

SEQ ID NO: 9028 - RNA, 21 nt, synthetic construct
  misc_feature 1..21: note = Synthetic
  source 1..21: mol_type = other RNA
tcctctcacaccagttcactc

SEQ ID NO: 9029 - RNA, 21 nt, synthetic construct
  misc_feature 1..21: note = Synthetic
  source 1..21: mol_type = other RNA
tcctctgccagcaacgtcgcc

SEQ ID NO: 9030 - RNA, 21 nt, synthetic construct
  misc_feature 1..21: note = Synthetic
  source 1..21: mol_type = other RNA
tcctctggggacagtaggttt

SEQ ID NO: 9031 - RNA, 21 nt, synthetic construct
  misc_feature 1..21: note = Synthetic
  source 1..21: mol_type = other RNA
tcctctgtggtcttctgatag

SEQ ID NO: 9032 - RNA, 21 nt, synthetic construct
  misc_feature 1..21: note = Synthetic
  source 1..21: mol_type = other RNA
tcctcttcacgcccttggtat

SEQ ID NO: 9033 - RNA, 21 nt, synthetic construct
  misc_feature 1..21: note = Synthetic
  source 1..21: mol_type = other RNA
tcctcttggctgggtgaggtt

SEQ ID NO: 9034 - RNA, 21 nt, synthetic construct
  misc_feature 1..21: note = Synthetic
  source 1..21: mol_type = other RNA
tcctgaactcaagtgatccag

SEQ ID NO: 9035 - RNA, 21 nt, synthetic construct
  misc_feature 1..21: note = Synthetic
  source 1..21: mol_type = other RNA
tcctgacactcatcgatatcg

SEQ ID NO: 9036 - RNA, 21 nt, synthetic construct
  misc_feature 1..21: note = Synthetic
  source 1..21: mol_type = other RNA
tcctgacactcatcgatatct

SEQ ID NO: 9037 - RNA, 21 nt, synthetic construct
  misc_feature 1..21: note = Synthetic
  source 1..21: mol_type = other RNA
tcctgacagccacacctgggt

SEQ ID NO: 9038 - RNA, 21 nt, synthetic construct
  misc_feature 1..21: note = Synthetic
  source 1..21: mol_type = other RNA
tcctgacctcatgatccaccc

SEQ ID NO: 9039 - RNA, 21 nt, synthetic construct
  misc_feature 1..21: note = Synthetic
  source 1..21: mol_type = other RNA
tcctgacctcgtgccggttgg

SEQ ID NO: 9040 - RNA, 21 nt, synthetic construct
  misc_feature 1..21: note = Synthetic
  source 1..21: mol_type = other RNA
tcctgagtttaggggtttggc

SEQ ID NO: 9041 - RNA, 21 nt, synthetic construct
  misc_feature 1..21: note = Synthetic
  source 1..21: mol_type = other RNA
tcctgcctcagcctcccaagt

SEQ ID NO: 9042 - RNA, 21 nt, synthetic construct
  misc_feature 1..21: note = Synthetic
  source 1..21: mol_type = other RNA
tcctgcctcagcctcccgagt

SEQ ID NO: 9043 - RNA, 21 nt, synthetic construct
  misc_feature 1..21: note = Synthetic
  source 1..21: mol_type = other RNA
tcctggagagaaatggaggtg

SEQ ID NO: 9044 - RNA, 21 nt, synthetic construct
  misc_feature 1..21: note = Synthetic
  source 1..21: mol_type = other RNA
tcctggcactcagcgctgcca

SEQ ID NO: 9045 - RNA, 21 nt, synthetic construct
  misc_feature 1..21: note = Synthetic
  source 1..21: mol_type = other RNA
tcctggcttaaggaaggtaca

SEQ ID NO: 9046 - RNA, 21 nt, synthetic construct
  misc_feature 1..21: note = Synthetic
  source 1..21: mol_type = other RNA
tcctgggactcatcagagcca

SEQ ID NO: 9047 - RNA, 21 nt, synthetic construct
  misc_feature 1..21: note = Synthetic
  source 1..21: mol_type = other RNA
tcctgggagcacgtcttgggg

SEQ ID NO: 9048 - RNA, 21 nt, synthetic construct
  misc_feature 1..21: note = Synthetic
  source 1..21: mol_type = other RNA
tcctgggctcaggcgatcctc

SEQ ID NO: 9049 - RNA, 21 nt, synthetic construct
  misc_feature 1..21: note = Synthetic
  source 1..21: mol_type = other RNA
tcctgggtggccactgcagcc

SEQ ID NO: 9050 - RNA, 21 nt, synthetic construct
  misc_feature 1..21: note = Synthetic
  source 1..21: mol_type = other RNA
tcctggtccccccgggcctgt

SEQ ID NO: 9051 - RNA, 21 nt, synthetic construct
  misc_feature 1..21: note = Synthetic
  source 1..21: mol_type = other RNA
tcctggttgtggcaaatgtgg

SEQ ID NO: 9052 - RNA, 21 nt, synthetic construct
  misc_feature 1..21: note = Synthetic
  source 1..21: mol_type = other RNA
tccttacggctgtggagctga

SEQ ID NO: 9053 - RNA, 21 nt, synthetic construct
  misc_feature 1..21: note = Synthetic
  source 1..21: mol_type = other RNA
tccttcacgaggaaaggaaga

SEQ ID NO: 9054 - RNA, 21 nt, synthetic construct
  misc_feature 1..21: note = Synthetic
  source 1..21: mol_type = other RNA
tccttgcagtcatattcccgg

SEQ ID NO: 9055 - RNA, 21 nt, synthetic construct
  misc_feature 1..21: note = Synthetic
  source 1..21: mol_type = other RNA
tccttgcagtcggggccacca

SEQ ID NO: 9056 - RNA, 21 nt, synthetic construct
  misc_feature 1..21: note = Synthetic
  source 1..21: mol_type = other RNA
tcgaaagacactgggtgggtc

SEQ ID NO: 9057 - RNA, 21 nt, synthetic construct
  misc_feature 1..21: note = Synthetic
  source 1..21: mol_type = other RNA
tcgaaggccgagcaggggcta

SEQ ID NO: 9058 - RNA, 21 nt, synthetic construct
  misc_feature 1..21: note = Synthetic
  source 1..21: mol_type = other RNA
tcgaggggtagctgtagccgt

SEQ ID NO: 9059 - RNA, 21 nt, synthetic construct
  misc_feature 1..21: note = Synthetic
  source 1..21: mol_type = other RNA
tcgatatcgcactctttgatg

SEQ ID NO: 9060 - RNA, 21 nt, synthetic construct
  misc_feature 1..21: note = Synthetic
  source 1..21: mol_type = other RNA
tcgatatcttcgcatcttcgc

SEQ ID NO: 9061 - RNA, 21 nt, synthetic construct
  misc_feature 1..21: note = Synthetic
  source 1..21: mol_type = other RNA
tcgatattcacgatcacggct

SEQ ID NO: 9062 - RNA, 21 nt, synthetic construct
  misc_feature 1..21: note = Synthetic
  source 1..21: mol_type = other RNA
tcgatcatggctcactgcaac

SEQ ID NO: 9063 - RNA, 21 nt, synthetic construct
  misc_feature 1..21: note = Synthetic
  source 1..21: mol_type = other RNA
tcgatctcctgacctcatgat

SEQ ID NO: 9064 - RNA, 21 nt, synthetic construct
  misc_feature 1..21: note = Synthetic
  source 1..21: mol_type = other RNA
tcgatgcttgagatggagtga

SEQ ID NO: 9065 - RNA, 21 nt, synthetic construct
  misc_feature 1..21: note = Synthetic
  source 1..21: mol_type = other RNA
tcgcacctccagaactgagga

SEQ ID NO: 9066 - RNA, 21 nt, synthetic construct
  misc_feature 1..21: note = Synthetic
  source 1..21: mol_type = other RNA
tcgcactctttgatgggttca

SEQ ID NO: 9067 - RNA, 21 nt, synthetic construct
  misc_feature 1..21: note = Synthetic
  source 1..21: mol_type = other RNA
tcgcagacccacttgtaggag

SEQ ID NO: 9068 - RNA, 21 nt, synthetic construct
  misc_feature 1..21: note = Synthetic
  source 1..21: mol_type = other RNA
tcgcagagtgtcacattaacg

SEQ ID NO: 9069 - RNA, 21 nt, synthetic construct
  misc_feature 1..21: note = Synthetic
  source 1..21: mol_type = other RNA
tcgcagagtgtcagacagcct

SEQ ID NO: 9070 - RNA, 21 nt, synthetic construct
  misc_feature 1..21: note = Synthetic
  source 1..21: mol_type = other RNA
tcgcagcctctgccaggcagt

SEQ ID NO: 9071 - RNA, 21 nt, synthetic construct
  misc_feature 1..21: note = Synthetic
  source 1..21: mol_type = other RNA
tcgcaggcccacagctggggg

SEQ ID NO: 9072 - RNA, 21 nt, synthetic construct
  misc_feature 1..21: note = Synthetic
  source 1..21: mol_type = other RNA
tcgcagtccacttggccatcg

SEQ ID NO: 9073 - RNA, 21 nt, synthetic construct
  misc_feature 1..21: note = Synthetic
  source 1..21: mol_type = other RNA
tcgcagtcggggtcgttgtcg

SEQ ID NO: 9074 - RNA, 21 nt, synthetic construct
  misc_feature 1..21: note = Synthetic
  source 1..21: mol_type = other RNA
tcgcatctgtcgcccacgtgg

SEQ ID NO: 9075 - RNA, 21 nt, synthetic construct
  misc_feature 1..21: note = Synthetic
  source 1..21: mol_type = other RNA
tcgcatctgtcgcccactgca

SEQ ID NO: 9076 - RNA, 21 nt, synthetic construct
  misc_feature 1..21: note = Synthetic
  source 1..21: mol_type = other RNA
tcgcatcttcgctgggccacc

SEQ ID NO: 9077 - RNA, 21 nt, synthetic construct
  misc_feature 1..21: note = Synthetic
  source 1..21: mol_type = other RNA
tcgccacagagcacagcggaa

SEQ ID NO: 9078 - RNA, 21 nt, synthetic construct
  misc_feature 1..21: note = Synthetic
  source 1..21: mol_type = other RNA
tcgccacttaggcagtggaac

SEQ ID NO: 9079 - RNA, 21 nt, synthetic construct
  misc_feature 1..21: note = Synthetic
  source 1..21: mol_type = other RNA
tcgccaggagggcccaggata

SEQ ID NO: 9080 - RNA, 21 nt, synthetic construct
  misc_feature 1..21: note = Synthetic
  source 1..21: mol_type = other RNA
tcgccatgcctggccagaggc

SEQ ID NO: 9081 - RNA, 21 nt, synthetic construct
  misc_feature 1..21: note = Synthetic
  source 1..21: mol_type = other RNA
tcgcccacgtggctgaagatc

SEQ ID NO: 9082 - RNA, 21 nt, synthetic construct
  misc_feature 1..21: note = Synthetic
  source 1..21: mol_type = other RNA
tcgcccactgcagtccccgcc

SEQ ID NO: 9083 - RNA, 21 nt, synthetic construct
  misc_feature 1..21: note = Synthetic
  source 1..21: mol_type = other RNA
tcgcccagagcttggtgagac

SEQ ID NO: 9084 - RNA, 21 nt, synthetic construct
  misc_feature 1..21: note = Synthetic
  source 1..21: mol_type = other RNA
tcgcccaggccagactgcgga

SEQ ID NO: 9085 - RNA, 21 nt, synthetic construct
  misc_feature 1..21: note = Synthetic
  source 1..21: mol_type = other RNA
tcgccgctgtgacacttgaac

SEQ ID NO: 9086 - RNA, 21 nt, synthetic construct
  misc_feature 1..21: note = Synthetic
  source 1..21: mol_type = other RNA
tcgcctttgtgacaggaaccg

SEQ ID NO: 9087 - RNA, 21 nt, synthetic construct
  misc_feature 1..21: note = Synthetic
  source 1..21: mol_type = other RNA
tcgcggaggcggctccgggga

SEQ ID NO: 9088 - RNA, 21 nt, synthetic construct
  misc_feature 1..21: note = Synthetic
  source 1..21: mol_type = other RNA
tcgctcatgtccttgcagtca

SEQ ID NO: 9089 - RNA, 21 nt, synthetic construct
  misc_feature 1..21: note = Synthetic
  source 1..21: mol_type = other RNA
tcgctccggtccagcgtcatc

SEQ ID NO: 9090 - RNA, 21 nt, synthetic construct
  misc_feature 1..21: note = Synthetic
  source 1..21: mol_type = other RNA
tcgctctgtcgcccaggccag

SEQ ID NO: 9091 - RNA, 21 nt, synthetic construct
  misc_feature 1..21: note = Synthetic
  source 1..21: mol_type = other RNA
tcgctgggccaccagctggaa

SEQ ID NO: 9092 - RNA, 21 nt, synthetic construct
  misc_feature 1..21: note = Synthetic
  source 1..21: mol_type = other RNA
tcgctttgttgctcaggcctg

SEQ ID NO: 9093 - RNA, 21 nt, synthetic construct
  misc_feature 1..21: note = Synthetic
  source 1..21: mol_type = other RNA
tcggaacctgtgaggcggttg

SEQ ID NO: 9094 - RNA, 21 nt, synthetic construct
  misc_feature 1..21: note = Synthetic
  source 1..21: mol_type = other RNA
tcggcctcccaaagtgctggg

SEQ ID NO: 9095 - RNA, 21 nt, synthetic construct
  misc_feature 1..21: note = Synthetic
  source 1..21: mol_type = other RNA
tcggctcactgcaagctccgc

SEQ ID NO: 9096 - RNA, 21 nt, synthetic construct
  misc_feature 1..21: note = Synthetic
  source 1..21: mol_type = other RNA
tcggctgcagaccaaggaggg

SEQ ID NO: 9097 - RNA, 21 nt, synthetic construct
  misc_feature 1..21: note = Synthetic
  source 1..21: mol_type = other RNA
tcgggaacaggtcgggtggtt

SEQ ID NO: 9098 - RNA, 21 nt, synthetic construct
  misc_feature 1..21: note = Synthetic
  source 1..21: mol_type = other RNA
tcgggaggatgggcaccaggc

SEQ ID NO: 9099 - RNA, 21 nt, synthetic construct
  misc_feature 1..21: note = Synthetic
  source 1..21: mol_type = other RNA
tcgggatcctgacactcatcg

SEQ ID NO: 9100 - RNA, 21 nt, synthetic construct
  misc_feature 1..21: note = Synthetic
  source 1..21: mol_type = other RNA
tcggggcacaggcactcgtag

SEQ ID NO: 9101 - RNA, 21 nt, synthetic construct
  misc_feature 1..21: note = Synthetic
  source 1..21: mol_type = other RNA
tcggggccaccatcacagcgc

SEQ ID NO: 9102 - RNA, 21 nt, synthetic construct
  misc_feature 1..21: note = Synthetic
  source 1..21: mol_type = other RNA
tcggggctggtggggcgaggg

SEQ ID NO: 9103 - RNA, 21 nt, synthetic construct
  misc_feature 1..21: note = Synthetic
  source 1..21: mol_type = other RNA
tcgggggcctggatgtctctg

SEQ ID NO: 9104 - RNA, 21 nt, synthetic construct
  misc_feature 1..21: note = Synthetic
  source 1..21: mol_type = other RNA
tcgggggtgacagggcaaagg

SEQ ID NO: 9105 - RNA, 21 nt, synthetic construct
  misc_feature 1..21: note = Synthetic
  source 1..21: mol_type = other RNA
tcggggtcgttgtcgcaggcc

SEQ ID NO: 9106 - RNA, 21 nt, synthetic construct
  misc_feature 1..21: note = Synthetic
  source 1..21: mol_type = other RNA
tcgggtggttgtgtgctgtgt

SEQ ID NO: 9107 - RNA, 21 nt, synthetic construct
  misc_feature 1..21: note = Synthetic
  source 1..21: mol_type = other RNA
tcggtccagtagatgttgctg

SEQ ID NO: 9108 - RNA, 21 nt, synthetic construct
  misc_feature 1..21: note = Synthetic
  source 1..21: mol_type = other RNA
tcggtgccaccacggattcag

SEQ ID NO: 9109 - RNA, 21 nt, synthetic construct
  misc_feature 1..21: note = Synthetic
  source 1..21: mol_type = other RNA
tcgtaaggaaccgaggccttg

SEQ ID NO: 9110 - RNA, 21 nt, synthetic construct
  misc_feature 1..21: note = Synthetic
  source 1..21: mol_type = other RNA
tcgtagccgatcttaaggtca

SEQ ID NO: 9111 - RNA, 21 nt, synthetic construct
  misc_feature 1..21: note = Synthetic
  source 1..21: mol_type = other RNA
tcgtcagatttgtccttgcag

SEQ ID NO: 9112 - RNA, 21 nt, synthetic construct
  misc_feature 1..21: note = Synthetic
  source 1..21: mol_type = other RNA
tcgtcagggcgacaggtggcc

SEQ ID NO: 9113 - RNA, 21 nt, synthetic construct
  misc_feature 1..21: note = Synthetic
  source 1..21: mol_type = other RNA
tcgtcctgggagcacgtcttg

SEQ ID NO: 9114 - RNA, 21 nt, synthetic construct
  misc_feature 1..21: note = Synthetic
  source 1..21: mol_type = other RNA
tcgtcgcctttgtgacaggaa

SEQ ID NO: 9115 - RNA, 21 nt, synthetic construct
  misc_feature 1..21: note = Synthetic
  source 1..21: mol_type = other RNA
tcgtctgagccgtccaagcag

SEQ ID NO: 9116 - RNA, 21 nt, synthetic construct
  misc_feature 1..21: note = Synthetic
  source 1..21: mol_type = other RNA
tcgtctgagccgttgtcgcag

SEQ ID NO: 9117 - RNA, 21 nt, synthetic construct
  misc_feature 1..21: note = Synthetic
  source 1..21: mol_type = other RNA
tcgtgcaaataatctttgtac

SEQ ID NO: 9118 - RNA, 21 nt, synthetic construct
  misc_feature 1..21: note = Synthetic
  source 1..21: mol_type = other RNA
tcgtgccggttggtgaagaag

SEQ ID NO: 9119 - RNA, 21 nt, synthetic construct
  misc_feature 1..21: note = Synthetic
  source 1..21: mol_type = other RNA
tcgtggcagcgaaactcgtcc

SEQ ID NO: 9120 - RNA, 21 nt, synthetic construct
  misc_feature 1..21: note = Synthetic
  source 1..21: mol_type = other RNA
tcgtgtatgtcgcggaggcgg

SEQ ID NO: 9121 - RNA, 21 nt, synthetic construct
  misc_feature 1..21: note = Synthetic
  source 1..21: mol_type = other RNA
tcgtgtgggggtccagctgga

SEQ ID NO: 9122 - RNA, 21 nt, synthetic construct
  misc_feature 1..21: note = Synthetic
  source 1..21: mol_type = other RNA
tcgttgatgatatctgtccaa

SEQ ID NO: 9123 - RNA, 21 nt, synthetic construct
  misc_feature 1..21: note = Synthetic
  source 1..21: mol_type = other RNA
tcgttggtcccgcactctttg

SEQ ID NO: 9124 - RNA, 21 nt, synthetic construct
  misc_feature 1..21: note = Synthetic
  source 1..21: mol_type = other RNA
tcgttgtcgcaggcccacagc

SEQ ID NO: 9125 - RNA, 21 nt, synthetic construct
  misc_feature 1..21: note = Synthetic
  source 1..21: mol_type = other RNA
tcgtttctttcgcatctgtcg

SEQ ID NO: 9126 - RNA, 21 nt, synthetic construct
  misc_feature 1..21: note = Synthetic
  source 1..21: mol_type = other RNA
tctagcaaggcttgcatagaa

SEQ ID NO: 9127 - RNA, 21 nt, synthetic construct
  misc_feature 1..21: note = Synthetic
  source 1..21: mol_type = other RNA
tctagccatgttgcagacttt

SEQ ID NO: 9128 - RNA, 21 nt, synthetic construct
  misc_feature 1..21: note = Synthetic
  source 1..21: mol_type = other RNA
tctagggtgatgccattgggc

SEQ ID NO: 9129 - RNA, 21 nt, synthetic construct
  misc_feature 1..21: note = Synthetic
  source 1..21: mol_type = other RNA
tctatacagtggtttaaaaag

SEQ ID NO: 9130 - RNA, 21 nt, synthetic construct
  misc_feature 1..21: note = Synthetic
  source 1..21: mol_type = other RNA
tctattgctggccacctccgt

SEQ ID NO: 9131 - RNA, 21 nt, synthetic construct
  misc_feature 1..21: note = Synthetic
  source 1..21: mol_type = other RNA
tctcacaccagttcactcctc

SEQ ID NO: 9132 - RNA, 21 nt, synthetic construct
  misc_feature 1..21: note = Synthetic
  source 1..21: mol_type = other RNA
tctcaggaagggttctgggca

SEQ ID NO: 9133 - RNA, 21 nt, synthetic construct
  misc_feature 1..21: note = Synthetic
  source 1..21: mol_type = other RNA
tctcaggcacttaataaatat

SEQ ID NO: 9134 - RNA, 21 nt, synthetic construct
  misc_feature 1..21: note = Synthetic
  source 1..21: mol_type = other RNA
tctcatttcctctgccagcaa

SEQ ID NO: 9135 - RNA, 21 nt, synthetic construct
  misc_feature 1..21: note = Synthetic
  source 1..21: mol_type = other RNA
tctccaactcctgaactcaag

SEQ ID NO: 9136 - RNA, 21 nt, synthetic construct
  misc_feature 1..21: note = Synthetic
  source 1..21: mol_type = other RNA
tctccaccgtggtgagcccag

SEQ ID NO: 9137 - RNA, 21 nt, synthetic construct
  misc_feature 1..21: note = Synthetic
  source 1..21: mol_type = other RNA
tctcccaaaaagcgttgcaca

SEQ ID NO: 9138 - RNA, 21 nt, synthetic construct
  misc_feature 1..21: note = Synthetic
  source 1..21: mol_type = other RNA
tctcccagaagccactcatac

SEQ ID NO: 9139 - RNA, 21 nt, synthetic construct
  misc_feature 1..21: note = Synthetic
  source 1..21: mol_type = other RNA
tctccctgaataacgttttcc

SEQ ID NO: 9140 - RNA, 21 nt, synthetic construct
  misc_feature 1..21: note = Synthetic
  source 1..21: mol_type = other RNA
tctccggacatcagtgcaaca

SEQ ID NO: 9141 - RNA, 21 nt, synthetic construct
  misc_feature 1..21: note = Synthetic
  source 1..21: mol_type = other RNA
tctcctgacctcatgatccac

SEQ ID NO: 9142 - RNA, 21 nt, synthetic construct
  misc_feature 1..21: note = Synthetic
  source 1..21: mol_type = other RNA
tctcctgcctcagcctcccga

SEQ ID NO: 9143 - RNA, 21 nt, synthetic construct
  misc_feature 1..21: note = Synthetic
  source 1..21: mol_type = other RNA
tctcctgggactcatcagagc

SEQ ID NO: 9144 - RNA, 21 nt, synthetic construct
  misc_feature 1..21: note = Synthetic
  source 1..21: mol_type = other RNA
tctcctgggtggccactgcag

SEQ ID NO: 9145 - RNA, 21 nt, synthetic construct
  misc_feature 1..21: note = Synthetic
  source 1..21: mol_type = other RNA
tctcgaggggtagctgtagcc

SEQ ID NO: 9146 - RNA, 21 nt, synthetic construct
  misc_feature 1..21: note = Synthetic
  source 1..21: mol_type = other RNA
tctcgatattcacgatcacgg

SEQ ID NO: 9147 - RNA, 21 nt, synthetic construct
  misc_feature 1..21: note = Synthetic
  source 1..21: mol_type = other RNA
tctcgatctcctgacctcatg

SEQ ID NO: 9148 - RNA, 21 nt, synthetic construct
  misc_feature 1..21: note = Synthetic
  source 1..21: mol_type = other RNA
tctcgctctgtcgcccaggcc

SEQ ID NO: 9149 - RNA, 21 nt, synthetic construct
  misc_feature 1..21: note = Synthetic
  source 1..21: mol_type = other RNA
tctcgctttgttgctcaggcc

SEQ ID NO: 9150 - RNA, 21 nt, synthetic construct
  misc_feature 1..21: note = Synthetic
  source 1..21: mol_type = other RNA
tctcggctcactgcaagctcc

SEQ ID NO: 9151 - RNA, 21 nt, synthetic construct
  misc_feature 1..21: note = Synthetic
  source 1..21: mol_type = other RNA
tctcggctgcagaccaaggag

SEQ ID NO: 9152 - RNA, 21 nt, synthetic construct
  misc_feature 1..21: note = Synthetic
  source 1..21: mol_type = other RNA
tctcggtgccaccacggattc

SEQ ID NO: 9153 - RNA, 21 nt, synthetic construct
  misc_feature 1..21: note = Synthetic
  source 1..21: mol_type = other RNA
tctctagccatgttgcagact

SEQ ID NO: 9154 - RNA, 21 nt, synthetic construct
  misc_feature 1..21: note = Synthetic
  source 1..21: mol_type = other RNA
tctctccggacatcagtgcaa

SEQ ID NO: 9155 - RNA, 21 nt, synthetic construct
  misc_feature 1..21: note = Synthetic
  source 1..21: mol_type = other RNA
tctctgctgatgacggtgtca

SEQ ID NO: 9156 - RNA, 21 nt, synthetic construct
  misc_feature 1..21: note = Synthetic
  source 1..21: mol_type = other RNA
tctctgggacaggtcagacca

SEQ ID NO: 9157 - RNA, 21 nt, synthetic construct
  misc_feature 1..21: note = Synthetic
  source 1..21: mol_type = other RNA
tctctgggcctgacatcccct

SEQ ID NO: 9158 - RNA, 21 nt, synthetic construct
  misc_feature 1..21: note = Synthetic
  source 1..21: mol_type = other RNA
tctctgtccccggcattcatt

SEQ ID NO: 9159 - RNA, 21 nt, synthetic construct
  misc_feature 1..21: note = Synthetic
  source 1..21: mol_type = other RNA
tctctgtctttgaataaaaca

SEQ ID NO: 9160 - RNA, 21 nt, synthetic construct
  misc_feature 1..21: note = Synthetic
  source 1..21: mol_type = other RNA
tctcttatccttcacgaggaa

SEQ ID NO: 9161 - RNA, 21 nt, synthetic construct
  misc_feature 1..21: note = Synthetic
  source 1..21: mol_type = other RNA
tctcttggctgggtgaggttg

SEQ ID NO: 9162 - RNA, 21 nt, synthetic construct
  misc_feature 1..21: note = Synthetic
  source 1..21: mol_type = other RNA
tctgaaatagggtcttcatct

SEQ ID NO: 9163 - RNA, 21 nt, synthetic construct
  misc_feature 1..21: note = Synthetic
  source 1..21: mol_type = other RNA
tctgaactgagaaagtgcaag

SEQ ID NO: 9164 - RNA, 21 nt, synthetic construct
  misc_feature 1..21: note = Synthetic
  source 1..21: mol_type = other RNA
tctgaccagtcccggcagtct

SEQ ID NO: 9165 - RNA, 21 nt, synthetic construct
  misc_feature 1..21: note = Synthetic
  source 1..21: mol_type = other RNA
tctgacggaggctgtcactgt

SEQ ID NO: 9166 - RNA, 21 nt, synthetic construct
  misc_feature 1..21: note = Synthetic
  source 1..21: mol_type = other RNA
tctgagccgtccaagcagtcc

SEQ ID NO: 9167 - RNA, 21 nt, synthetic construct
  misc_feature 1..21: note = Synthetic
  source 1..21: mol_type = other RNA
tctgagccgttgtcgcagtcc

SEQ ID NO: 9168 - RNA, 21 nt, synthetic construct
  misc_feature 1..21: note = Synthetic
  source 1..21: mol_type = other RNA
tctgaggcaacgtttcaacct

SEQ ID NO: 9169 - RNA, 21 nt, synthetic construct
  misc_feature 1..21: note = Synthetic
  source 1..21: mol_type = other RNA
tctgagtcacagacgaactgc

SEQ ID NO: 9170 - RNA, 21 nt, synthetic construct
  misc_feature 1..21: note = Synthetic
  source 1..21: mol_type = other RNA
tctgatagacggggttgtcaa

SEQ ID NO: 9171 - RNA, 21 nt, synthetic construct
  misc_feature 1..21: note = Synthetic
  source 1..21: mol_type = other RNA
tctgccagcaacgtcgcccag

SEQ ID NO: 9172 - RNA, 21 nt, synthetic construct
  misc_feature 1..21: note = Synthetic
  source 1..21: mol_type = other RNA
tctgccaggcagtgtcccgac

SEQ ID NO: 9173 - RNA, 21 nt, synthetic construct
  misc_feature 1..21: note = Synthetic
  source 1..21: mol_type = other RNA
tctgcctcccagatgaataaa

SEQ ID NO: 9174 - RNA, 21 nt, synthetic construct
  misc_feature 1..21: note = Synthetic
  source 1..21: mol_type = other RNA
tctgcctctgggaagtggcat

SEQ ID NO: 9175 - RNA, 21 nt, synthetic construct
  misc_feature 1..21: note = Synthetic
  source 1..21: mol_type = other RNA
tctgcggggcagggaggcaca

SEQ ID NO: 9176 - RNA, 21 nt, synthetic construct
  misc_feature 1..21: note = Synthetic
  source 1..21: mol_type = other RNA
tctgctgatgacggtgtcata

SEQ ID NO: 9177 - RNA, 21 nt, synthetic construct
  misc_feature 1..21: note = Synthetic
  source 1..21: mol_type = other RNA
tctgctgttgtgtgttgaaag

SEQ ID NO: 9178 - RNA, 21 nt, synthetic construct
  misc_feature 1..21: note = Synthetic
  source 1..21: mol_type = other RNA
tctggcaggcaatgctttggt

SEQ ID NO: 9179 - RNA, 21 nt, synthetic construct
  misc_feature 1..21: note = Synthetic
  source 1..21: mol_type = other RNA
tctggccaaattcatttttta

SEQ ID NO: 9180 - RNA, 21 nt, synthetic construct
  misc_feature 1..21: note = Synthetic
  source 1..21: mol_type = other RNA
tctgggaagtggcatcatttg

SEQ ID NO: 9181 - RNA, 21 nt, synthetic construct
  misc_feature 1..21: note = Synthetic
  source 1..21: mol_type = other RNA
tctgggacaggtcagaccagt

SEQ ID NO: 9182 - RNA, 21 nt, synthetic construct
  misc_feature 1..21: note = Synthetic
  source 1..21: mol_type = other RNA
tctgggcagggacgggactcc

SEQ ID NO: 9183 - RNA, 21 nt, synthetic construct
  misc_feature 1..21: note = Synthetic
  source 1..21: mol_type = other RNA
tctgggcctgacatcccctcc

SEQ ID NO: 9184 - RNA, 21 nt, synthetic construct
  misc_feature 1..21: note = Synthetic
  source 1..21: mol_type = other RNA
tctggggacagtaggttttca

SEQ ID NO: 9185 - RNA, 21 nt, synthetic construct
  misc_feature 1..21: note = Synthetic
  source 1..21: mol_type = other RNA
tctgtacagggacgcatttac

SEQ ID NO: 9186 - RNA, 21 nt, synthetic construct
  misc_feature 1..21: note = Synthetic
  source 1..21: mol_type = other RNA
tctgtcaagctgggtgctgca

SEQ ID NO: 9187 - RNA, 21 nt, synthetic construct
  misc_feature 1..21: note = Synthetic
  source 1..21: mol_type = other RNA
tctgtcacacagctgcccccg

SEQ ID NO: 9188 - RNA, 21 nt, synthetic construct
  misc_feature 1..21: note = Synthetic
  source 1..21: mol_type = other RNA
tctgtccaaaatactttgtcc

SEQ ID NO: 9189 - RNA, 21 nt, synthetic construct
  misc_feature 1..21: note = Synthetic
  source 1..21: mol_type = other RNA
tctgtccccggcattcattga

SEQ ID NO: 9190 - RNA, 21 nt, synthetic construct
  misc_feature 1..21: note = Synthetic
  source 1..21: mol_type = other RNA
tctgtcgcccacgtggctgaa

SEQ ID NO: 9191 - RNA, 21 nt, synthetic construct
  misc_feature 1..21: note = Synthetic
  source 1..21: mol_type = other RNA
tctgtcgcccactgcagtccc

SEQ ID NO: 9192 - RNA, 21 nt, synthetic construct
  misc_feature 1..21: note = Synthetic
  source 1..21: mol_type = other RNA
tctgtcgcccaggccagactg

SEQ ID NO: 9193 - RNA, 21 nt, synthetic construct
  misc_feature 1..21: note = Synthetic
  source 1..21: mol_type = other RNA
tctgtctcgaggggtagctgt

SEQ ID NO: 9194 - RNA, 21 nt, synthetic construct
  misc_feature 1..21: note = Synthetic
  source 1..21: mol_type = other RNA
tctgtctttgaataaaacaag

SEQ ID NO: 9195 - RNA, 21 nt, synthetic construct
  misc_feature 1..21: note = Synthetic
  source 1..21: mol_type = other RNA
tctgtgaacttgatcggggct

SEQ ID NO: 9196 - RNA, 21 nt, synthetic construct
  misc_feature 1..21: note = Synthetic
  source 1..21: mol_type = other RNA
tctgtgaggcagctcctcatg

SEQ ID NO: 9197 - RNA, 21 nt, synthetic construct
  misc_feature 1..21: note = Synthetic
  source 1..21: mol_type = other RNA
tctgtggtcttctgatagacg

SEQ ID NO: 9198 - RNA, 21 nt, synthetic construct
  misc_feature 1..21: note = Synthetic
  source 1..21: mol_type = other RNA
tctgttgcccaggctggagtg

SEQ ID NO: 9199 - RNA, 21 nt, synthetic construct
  misc_feature 1..21: note = Synthetic
  source 1..21: mol_type = other RNA
tcttaagccgccagttcttcc

SEQ ID NO: 9200 - RNA, 21 nt, synthetic construct
  misc_feature 1..21: note = Synthetic
  source 1..21: mol_type = other RNA
tcttaaggtcattgcagacgt

SEQ ID NO: 9201 - RNA, 21 nt, synthetic construct
  misc_feature 1..21: note = Synthetic
  source 1..21: mol_type = other RNA
tcttactatgttgcccaggct

SEQ ID NO: 9202 - RNA, 21 nt, synthetic construct
  misc_feature 1..21: note = Synthetic
  source 1..21: mol_type = other RNA
tcttatccttcacgaggaaag

SEQ ID NO: 9203 - RNA, 21 nt, synthetic construct
  misc_feature 1..21: note = Synthetic
  source 1..21: mol_type = other RNA
tcttcacgcccttggtatccg

SEQ ID NO: 9204 - RNA, 21 nt, synthetic construct
  misc_feature 1..21: note = Synthetic
  source 1..21: mol_type = other RNA
tcttcacgcgggagtctgacg

SEQ ID NO: 9205 - RNA, 21 nt, synthetic construct
  misc_feature 1..21: note = Synthetic
  source 1..21: mol_type = other RNA
tcttcatctgttgcccaggct

SEQ ID NO: 9206 - RNA, 21 nt, synthetic construct
  misc_feature 1..21: note = Synthetic
  source 1..21: mol_type = other RNA
tcttccatagaaggaagaccc

SEQ ID NO: 9207 - RNA, 21 nt, synthetic construct
  misc_feature 1..21: note = Synthetic
  source 1..21: mol_type = other RNA
tcttccatgtttgaggattgt

SEQ ID NO: 9208 - RNA, 21 nt, synthetic construct
  misc_feature 1..21: note = Synthetic
  source 1..21: mol_type = other RNA
tcttccggttgcccccgttga

SEQ ID NO: 9209 - RNA, 21 nt, synthetic construct
  misc_feature 1..21: note = Synthetic
  source 1..21: mol_type = other RNA
tcttcctgacctcgtgccggt

SEQ ID NO: 9210 - RNA, 21 nt, synthetic construct
  misc_feature 1..21: note = Synthetic
  source 1..21: mol_type = other RNA
tcttcgcagtcggggtcgttg

SEQ ID NO: 9211 - RNA, 21 nt, synthetic construct
  misc_feature 1..21: note = Synthetic
  source 1..21: mol_type = other RNA
tcttcgcatcttcgctgggcc

SEQ ID NO: 9212 - RNA, 21 nt, synthetic construct
  misc_feature 1..21: note = Synthetic
  source 1..21: mol_type = other RNA
tcttcgctgggccaccagctg

SEQ ID NO: 9213 - RNA, 21 nt, synthetic construct
  misc_feature 1..21: note = Synthetic
  source 1..21: mol_type = other RNA
tcttctcatttcctctgccag

SEQ ID NO: 9214 - RNA, 21 nt, synthetic construct
  misc_feature 1..21: note = Synthetic
  source 1..21: mol_type = other RNA
tcttctctgtctttgaataaa

SEQ ID NO: 9215 - RNA, 21 nt, synthetic construct
  misc_feature 1..21: note = Synthetic
  source 1..21: mol_type = other RNA
tcttctgatagacggggttgt

SEQ ID NO: 9216 - RNA, 21 nt, synthetic construct
  misc_feature 1..21: note = Synthetic
  source 1..21: mol_type = other RNA
tcttgatcttggcgggagttc

SEQ ID NO: 9217 - RNA, 21 nt, synthetic construct
  misc_feature 1..21: note = Synthetic
  source 1..21: mol_type = other RNA
tcttggcactggaactcgttt

SEQ ID NO: 9218 - RNA, 21 nt, synthetic construct
  misc_feature 1..21: note = Synthetic
  source 1..21: mol_type = other RNA
tcttggcgggagttccccagt

SEQ ID NO: 9219 - RNA, 21 nt, synthetic construct
  misc_feature 1..21: note = Synthetic
  source 1..21: mol_type = other RNA
tcttggctgggtgaggttgtg

SEQ ID NO: 9220 - RNA, 21 nt, synthetic construct
  misc_feature 1..21: note = Synthetic
  source 1..21: mol_type = other RNA
tcttgggggagcacgtctcct

SEQ ID NO: 9221 - RNA, 21 nt, synthetic construct
  misc_feature 1..21: note = Synthetic
  source 1..21: mol_type = other RNA
tcttggggggacagccttgct

SEQ ID NO: 9222 - RNA, 21 nt, synthetic construct
  misc_feature 1..21: note = Synthetic
  source 1..21: mol_type = other RNA
tctttcgcatctgtcgcccac

SEQ ID NO: 9223 - RNA, 21 nt, synthetic construct
  misc_feature 1..21: note = Synthetic
  source 1..21: mol_type = other RNA
tctttgaataaaacaaggccg

SEQ ID NO: 9224 - RNA, 21 nt, synthetic construct
  misc_feature 1..21: note = Synthetic
  source 1..21: mol_type = other RNA
tctttgatgggttcatctgac

SEQ ID NO: 9225 - RNA, 21 nt, synthetic construct
  misc_feature 1..21: note = Synthetic
  source 1..21: mol_type = other RNA
tctttgtacataaagaagagg

SEQ ID NO: 9226 - RNA, 21 nt, synthetic construct
  misc_feature 1..21: note = Synthetic
  source 1..21: mol_type = other RNA
tcttttcatcctccaagatgg

SEQ ID NO: 9227 - RNA, 21 nt, synthetic construct
  misc_feature 1..21: note = Synthetic
  source 1..21: mol_type = other RNA
tgaaaatggcttcgttgatga

SEQ ID NO: 9228 - RNA, 21 nt, synthetic construct
  misc_feature 1..21: note = Synthetic
  source 1..21: mol_type = other RNA
tgaaagccacttgcttctctg

SEQ ID NO: 9229 - RNA, 21 nt, synthetic construct
  misc_feature 1..21: note = Synthetic
  source 1..21: mol_type = other RNA
tgaaatagggtcttcatctgt

SEQ ID NO: 9230 - RNA, 21 nt, synthetic construct
  misc_feature 1..21: note = Synthetic
  source 1..21: mol_type = other RNA
tgaacaaatacagcaaccagg

SEQ ID NO: 9231 - RNA, 21 nt, synthetic construct
  misc_feature 1..21: note = Synthetic
  source 1..21: mol_type = other RNA
tgaacaggatccaccacgatg

SEQ ID NO: 9232 - RNA, 21 nt, synthetic construct
  misc_feature 1..21: note = Synthetic
  source 1..21: mol_type = other RNA
tgaactcaagtgatccagctc

SEQ ID NO: 9233 - RNA, 21 nt, synthetic construct
  misc_feature 1..21: note = Synthetic
  source 1..21: mol_type = other RNA
tgaactgagaaagtgcaagga

SEQ ID NO: 9234 - RNA, 21 nt, synthetic construct
  misc_feature 1..21: note = Synthetic
  source 1..21: mol_type = other RNA
tgaacttgatcggggctggtg

SEQ ID NO: 9235 - RNA, 21 nt, synthetic construct
  misc_feature 1..21: note = Synthetic
  source 1..21: mol_type = other RNA
tgaacttgttgggtccctcgc

SEQ ID NO: 9236 - RNA, 21 nt, synthetic construct
  misc_feature 1..21: note = Synthetic
  source 1..21: mol_type = other RNA
tgaagaagaggtaggcgatgg

SEQ ID NO: 9237 - RNA, 21 nt, synthetic construct
  misc_feature 1..21: note = Synthetic
  source 1..21: mol_type = other RNA
tgaagatctcggctgcagacc

SEQ ID NO: 9238 - RNA, 21 nt, synthetic construct
  misc_feature 1..21: note = Synthetic
  source 1..21: mol_type = other RNA
tgaagccatgaacaggatcca

SEQ ID NO: 9239 - RNA, 21 nt, synthetic construct
  misc_feature 1..21: note = Synthetic
  source 1..21: mol_type = other RNA
tgaagtccccggatttgcagg

SEQ ID NO: 9240 - RNA, 21 nt, synthetic construct
  misc_feature 1..21: note = Synthetic
  source 1..21: mol_type = other RNA
tgaagtcccggtcaacctgcc

SEQ ID NO: 9241 - RNA, 21 nt, synthetic construct
  misc_feature 1..21: note = Synthetic
  source 1..21: mol_type = other RNA
tgaagtcccgtcaaacgatcc

SEQ ID NO: 9242 - RNA, 21 nt, synthetic construct
  misc_feature 1..21: note = Synthetic
  source 1..21: mol_type = other RNA
tgaagtttggagtcaacccag

SEQ ID NO: 9243 - RNA, 21 nt, synthetic construct
  misc_feature 1..21: note = Synthetic
  source 1..21: mol_type = other RNA
tgaataaaacaaggccggcga

SEQ ID NO: 9244 - RNA, 21 nt, synthetic construct
  misc_feature 1..21: note = Synthetic
  source 1..21: mol_type = other RNA
tgaataaatatataaaacaaa

SEQ ID NO: 9245 - RNA, 21 nt, synthetic construct
  misc_feature 1..21: note = Synthetic
  source 1..21: mol_type = other RNA
tgaataacgttttcctcttca

SEQ ID NO: 9246 - RNA, 21 nt, synthetic construct
  misc_feature 1..21: note = Synthetic
  source 1..21: mol_type = other RNA
tgaatccctttcctggcttaa

SEQ ID NO: 9247 - RNA, 21 nt, synthetic construct
  misc_feature 1..21: note = Synthetic
  source 1..21: mol_type = other RNA
tgaatgagtttggtctcggtg

SEQ ID NO: 9248 - RNA, 21 nt, synthetic construct
  misc_feature 1..21: note = Synthetic
  source 1..21: mol_type = other RNA
tgaatggcttggaggcatttg

SEQ ID NO: 9249 - RNA, 21 nt, synthetic construct
  misc_feature 1..21: note = Synthetic
  source 1..21: mol_type = other RNA
tgaatgttttcagtcaccagc

SEQ ID NO: 9250 - RNA, 21 nt, synthetic construct
  misc_feature 1..21: note = Synthetic
  source 1..21: mol_type = other RNA
tgacacccatctcccagaagc

SEQ ID NO: 9251 - RNA, 21 nt, synthetic construct
  misc_feature 1..21: note = Synthetic
  source 1..21: mol_type = other RNA
tgacacggcccccacagctga

SEQ ID NO: 9252 - RNA, 21 nt, synthetic construct
  misc_feature 1..21: note = Synthetic
  source 1..21: mol_type = other RNA
tgacacgggctttccctggcc

SEQ ID NO: 9253 - RNA, 21 nt, synthetic construct
  misc_feature 1..21: note = Synthetic
  source 1..21: mol_type = other RNA
tgacactcatcgatatcgcac

SEQ ID NO: 9254 - RNA, 21 nt, synthetic construct
  misc_feature 1..21: note = Synthetic
  source 1..21: mol_type = other RNA
tgacactcatcgatatcttcg

SEQ ID NO: 9255 - RNA, 21 nt, synthetic construct
  misc_feature 1..21: note = Synthetic
  source 1..21: mol_type = other RNA
tgacacttgaacttgttgggt

SEQ ID NO: 9256 - RNA, 21 nt, synthetic construct
  misc_feature 1..21: note = Synthetic
  source 1..21: mol_type = other RNA
tgacagacaagcacgtctcct

SEQ ID NO: 9257 - RNA, 21 nt, synthetic construct
  misc_feature 1..21: note = Synthetic
  source 1..21: mol_type = other RNA
tgacagccacacctgggtgca

SEQ ID NO: 9258 - RNA, 21 nt, synthetic construct
  misc_feature 1..21: note = Synthetic
  source 1..21: mol_type = other RNA
tgacaggaaccgcggaggaac

SEQ ID NO: 9259 - RNA, 21 nt, synthetic construct
  misc_feature 1..21: note = Synthetic
  source 1..21: mol_type = other RNA
tgacagggcaaaggctaacct

SEQ ID NO: 9260 - RNA, 21 nt, synthetic construct
  misc_feature 1..21: note = Synthetic
  source 1..21: mol_type = other RNA
tgacatcccctcccctttcat

SEQ ID NO: 9261 - RNA, 21 nt, synthetic construct
  misc_feature 1..21: note = Synthetic
  source 1..21: mol_type = other RNA
tgacatcgatgcttgagatgg

SEQ ID NO: 9262 - RNA, 21 nt, synthetic construct
  misc_feature 1..21: note = Synthetic
  source 1..21: mol_type = other RNA
tgacatcggaacctgtgaggc

SEQ ID NO: 9263 - RNA, 21 nt, synthetic construct
  misc_feature 1..21: note = Synthetic
  source 1..21: mol_type = other RNA
tgacatcttcacgcgggagtc

SEQ ID NO: 9264 - RNA, 21 nt, synthetic construct
  misc_feature 1..21: note = Synthetic
  source 1..21: mol_type = other RNA
tgaccagtcccggcagtctct

SEQ ID NO: 9265 - RNA, 21 nt, synthetic construct
  misc_feature 1..21: note = Synthetic
  source 1..21: mol_type = other RNA
tgaccagtgactcaggctctg

SEQ ID NO: 9266 - RNA, 21 nt, synthetic construct
  misc_feature 1..21: note = Synthetic
  source 1..21: mol_type = other RNA
tgaccatcgaggggtagctgt

SEQ ID NO: 9267 - RNA, 21 nt, synthetic construct
  misc_feature 1..21: note = Synthetic
  source 1..21: mol_type = other RNA
tgaccatctgtctcgaggggt

SEQ ID NO: 9268 - RNA, 21 nt, synthetic construct
  misc_feature 1..21: note = Synthetic
  source 1..21: mol_type = other RNA
tgacctcatgatccacccgcc

SEQ ID NO: 9269 - RNA, 21 nt, synthetic construct
  misc_feature 1..21: note = Synthetic
  source 1..21: mol_type = other RNA
tgacctcgtgccggttggtga

SEQ ID NO: 9270 - RNA, 21 nt, synthetic construct
  misc_feature 1..21: note = Synthetic
  source 1..21: mol_type = other RNA
tgacctttagcctgacggtgg

SEQ ID NO: 9271 - RNA, 21 nt, synthetic construct
  misc_feature 1..21: note = Synthetic
  source 1..21: mol_type = other RNA
tgacggaggctgtcactgtct

SEQ ID NO: 9272 - RNA, 21 nt, synthetic construct
  misc_feature 1..21: note = Synthetic
  source 1..21: mol_type = other RNA
tgacggtggatgtctcctggg

SEQ ID NO: 9273 - RNA, 21 nt, synthetic construct
  misc_feature 1..21: note = Synthetic
  source 1..21: mol_type = other RNA
tgacggtgtcataggaagaga

SEQ ID NO: 9274 - RNA, 21 nt, synthetic construct
  misc_feature 1..21: note = Synthetic
  source 1..21: mol_type = other RNA
tgactcaggctctgcctctgg

SEQ ID NO: 9275 - RNA, 21 nt, synthetic construct
  misc_feature 1..21: note = Synthetic
  source 1..21: mol_type = other RNA
tgactcctgagtttaggggtt

SEQ ID NO: 9276 - RNA, 21 nt, synthetic construct
  misc_feature 1..21: note = Synthetic
  source 1..21: mol_type = other RNA
tgagaaagtgcaaggagacca

SEQ ID NO: 9277 - RNA, 21 nt, synthetic construct
  misc_feature 1..21: note = Synthetic
  source 1..21: mol_type = other RNA
tgagacattgtcactatctcc

SEQ ID NO: 9278 - RNA, 21 nt, synthetic construct
  misc_feature 1..21: note = Synthetic
  source 1..21: mol_type = other RNA
tgagacggagtctcgctctgt

SEQ ID NO: 9279 - RNA, 21 nt, synthetic construct
  misc_feature 1..21: note = Synthetic
  source 1..21: mol_type = other RNA
tgagatggagtgaagtttgga

SEQ ID NO: 9280 - RNA, 21 nt, synthetic construct
  misc_feature 1..21: note = Synthetic
  source 1..21: mol_type = other RNA
tgagcaccgggcaggaggcct

SEQ ID NO: 9281 - RNA, 21 nt, synthetic construct
  misc_feature 1..21: note = Synthetic
  source 1..21: mol_type = other RNA
tgagccactgcgcccggcctc

SEQ ID NO: 9282 - RNA, 21 nt, synthetic construct
  misc_feature 1..21: note = Synthetic
  source 1..21: mol_type = other RNA
tgagcccaggggtggccccag

SEQ ID NO: 9283 - RNA, 21 nt, synthetic construct
  misc_feature 1..21: note = Synthetic
  source 1..21: mol_type = other RNA
tgagccgtccaagcagtcccg

SEQ ID NO: 9284 - RNA, 21 nt, synthetic construct
  misc_feature 1..21: note = Synthetic
  source 1..21: mol_type = other RNA
tgagccgttgtcgcagtccac

SEQ ID NO: 9285 - RNA, 21 nt, synthetic construct
  misc_feature 1..21: note = Synthetic
  source 1..21: mol_type = other RNA
tgagctcaaaccatcctccca

SEQ ID NO: 9286 - RNA, 21 nt, synthetic construct
  misc_feature 1..21: note = Synthetic
  source 1..21: mol_type = other RNA
tgaggaatgcagcggttgaca

SEQ ID NO: 9287 - RNA, 21 nt, synthetic construct
  misc_feature 1..21: note = Synthetic
  source 1..21: mol_type = other RNA
tgaggagatctagggtgatgc

SEQ ID NO: 9288 - RNA, 21 nt, synthetic construct
  misc_feature 1..21: note = Synthetic
  source 1..21: mol_type = other RNA
tgaggattgtgtcacggtgga

SEQ ID NO: 9289 - RNA, 21 nt, synthetic construct
  misc_feature 1..21: note = Synthetic
  source 1..21: mol_type = other RNA
tgaggcaacgtttcaacctcg

SEQ ID NO: 9290 - RNA, 21 nt, synthetic construct
  misc_feature 1..21: note = Synthetic
  source 1..21: mol_type = other RNA
tgaggcacctgtgtctggcca

SEQ ID NO: 9291 - RNA, 21 nt, synthetic construct
  misc_feature 1..21: note = Synthetic
  source 1..21: mol_type = other RNA
tgaggcagctcctcatgtccc

SEQ ID NO: 9292 - RNA, 21 nt, synthetic construct
  misc_feature 1..21: note = Synthetic
  source 1..21: mol_type = other RNA
tgaggcagggccagggggtcc

SEQ ID NO: 9293 - RNA, 21 nt, synthetic construct
  misc_feature 1..21: note = Synthetic
  source 1..21: mol_type = other RNA
tgaggcggttggcactgaaaa

SEQ ID NO: 9294 - RNA, 21 nt, synthetic construct
  misc_feature 1..21: note = Synthetic
  source 1..21: mol_type = other RNA
tgaggctggtgtactcgctcc

SEQ ID NO: 9295 - RNA, 21 nt, synthetic construct
  misc_feature 1..21: note = Synthetic
  source 1..21: mol_type = other RNA
tgagggtggccgggggcccct

SEQ ID NO: 9296 - RNA, 21 nt, synthetic construct
  misc_feature 1..21: note = Synthetic
  source 1..21: mol_type = other RNA
tgaggttgtggaagagaacca

SEQ ID NO: 9297 - RNA, 21 nt, synthetic construct
  misc_feature 1..21: note = Synthetic
  source 1..21: mol_type = other RNA
tgagtcacagacgaactgccg

SEQ ID NO: 9298 - RNA, 21 nt, synthetic construct
  misc_feature 1..21: note = Synthetic
  source 1..21: mol_type = other RNA
tgagtttaggggtttggctta

SEQ ID NO: 9299 - RNA, 21 nt, synthetic construct
  misc_feature 1..21: note = Synthetic
  source 1..21: mol_type = other RNA
tgagtttggtctcggtgccac

SEQ ID NO: 9300 - RNA, 21 nt, synthetic construct
  misc_feature 1..21: note = Synthetic
  source 1..21: mol_type = other RNA
tgataacagtttcaaccaata

SEQ ID NO: 9301 - RNA, 21 nt, synthetic construct
  misc_feature 1..21: note = Synthetic
  source 1..21: mol_type = other RNA
tgatagacggggttgtcaaag

SEQ ID NO: 9302 - RNA, 21 nt, synthetic construct
  misc_feature 1..21: note = Synthetic
  source 1..21: mol_type = other RNA
tgatatctgtccaaaatactt

SEQ ID NO: 9303 - RNA, 21 nt, synthetic construct
  misc_feature 1..21: note = Synthetic
  source 1..21: mol_type = other RNA
tgatcacagtaagacattcag

SEQ ID NO: 9304 - RNA, 21 nt, synthetic construct
  misc_feature 1..21: note = Synthetic
  source 1..21: mol_type = other RNA
tgatccacccgcctcggcctc

SEQ ID NO: 9305 - RNA, 21 nt, synthetic construct
  misc_feature 1..21: note = Synthetic
  source 1..21: mol_type = other RNA
tgatccagctcagcctcccaa

SEQ ID NO: 9306 - RNA, 21 nt, synthetic construct
  misc_feature 1..21: note = Synthetic
  source 1..21: mol_type = other RNA
tgatcggggctggtggggcga

SEQ ID NO: 9307 - RNA, 21 nt, synthetic construct
  misc_feature 1..21: note = Synthetic
  source 1..21: mol_type = other RNA
tgatctgcggggcagggaggc

SEQ ID NO: 9308 - RNA, 21 nt, synthetic construct
  misc_feature 1..21: note = Synthetic
  source 1..21: mol_type = other RNA
tgatcttggcgggagttcccc

SEQ ID NO: 9309 - RNA, 21 nt, synthetic construct
  misc_feature 1..21: note = Synthetic
  source 1..21: mol_type = other RNA
tgatgacggtgtcataggaag

SEQ ID NO: 9310 - RNA, 21 nt, synthetic construct
  misc_feature 1..21: note = Synthetic
  source 1..21: mol_type = other RNA
tgatgatatctgtccaaaata

SEQ ID NO: 9311 - RNA, 21 nt, synthetic construct
  misc_feature 1..21: note = Synthetic
  source 1..21: mol_type = other RNA
tgatgcaccatgcatggtttt

SEQ ID NO: 9312 - RNA, 21 nt, synthetic construct
  misc_feature 1..21: note = Synthetic
  source 1..21: mol_type = other RNA
tgatgcattcgccgctgtgac

SEQ ID NO: 9313 - RNA, 21 nt, synthetic construct
  misc_feature 1..21: note = Synthetic
  source 1..21: mol_type = other RNA
tgatgccattgggccactgaa

SEQ ID NO: 9314 - RNA, 21 nt, synthetic construct
  misc_feature 1..21: note = Synthetic
  source 1..21: mol_type = other RNA
tgatgctgttgatgttcttaa

SEQ ID NO: 9315 - RNA, 21 nt, synthetic construct
  misc_feature 1..21: note = Synthetic
  source 1..21: mol_type = other RNA
tgatgggttcatctgaccagt

SEQ ID NO: 9316 - RNA, 21 nt, synthetic construct
  misc_feature 1..21: note = Synthetic
  source 1..21: mol_type = other RNA
tgatgttcttaagccgccagt

SEQ ID NO: 9317 - RNA, 21 nt, synthetic construct
  misc_feature 1..21: note = Synthetic
  source 1..21: mol_type = other RNA
tgattcgggggtgacagggca

SEQ ID NO: 9318 - RNA, 21 nt, synthetic construct
  misc_feature 1..21: note = Synthetic
  source 1..21: mol_type = other RNA
tgatttttaactttttggttt

SEQ ID NO: 9319 - RNA, 21 nt, synthetic construct
  misc_feature 1..21: note = Synthetic
  source 1..21: mol_type = other RNA
tgcaaaaataaatagatttta

SEQ ID NO: 9320 - RNA, 21 nt, synthetic construct
  misc_feature 1..21: note = Synthetic
  source 1..21: mol_type = other RNA
tgcaaaataataacacaaatg

SEQ ID NO: 9321 - RNA, 21 nt, synthetic construct
  misc_feature 1..21: note = Synthetic
  source 1..21: mol_type = other RNA
tgcaaacataacaaaaaatcc

SEQ ID NO: 9322 - RNA, 21 nt, synthetic construct
  misc_feature 1..21: note = Synthetic
  source 1..21: mol_type = other RNA
tgcaaataatctttgtacata

SEQ ID NO: 9323 - RNA, 21 nt, synthetic construct
  misc_feature 1..21: note = Synthetic
  source 1..21: mol_type = other RNA
tgcaacagtaacacggcgatt

SEQ ID NO: 9324 - RNA, 21 nt, synthetic construct
  misc_feature 1..21: note = Synthetic
  source 1..21: mol_type = other RNA
tgcaacctccacctcctgggc

SEQ ID NO: 9325 - RNA, 21 nt, synthetic construct
  misc_feature 1..21: note = Synthetic
  source 1..21: mol_type = other RNA
tgcaagctccgcttcccgggt

SEQ ID NO: 9326 - RNA, 21 nt, synthetic construct
  misc_feature 1..21: note = Synthetic
  source 1..21: mol_type = other RNA
tgcaaggagaccacgggaatg

SEQ ID NO: 9327 - RNA, 21 nt, synthetic construct
  misc_feature 1..21: note = Synthetic
  source 1..21: mol_type = other RNA
tgcacacagtccagttcgtgc

SEQ ID NO: 9328 - RNA, 21 nt, synthetic construct
  misc_feature 1..21: note = Synthetic
  source 1..21: mol_type = other RNA
tgcaccatgcatggttttttt

SEQ ID NO: 9329 - RNA, 21 nt, synthetic construct
  misc_feature 1..21: note = Synthetic
  source 1..21: mol_type = other RNA
tgcactcgccacttaggcagt

SEQ ID NO: 9330 - RNA, 21 nt, synthetic construct
  misc_feature 1..21: note = Synthetic
  source 1..21: mol_type = other RNA
tgcactggaagctggcgggac

SEQ ID NO: 9331 - RNA, 21 nt, synthetic construct
  misc_feature 1..21: note = Synthetic
  source 1..21: mol_type = other RNA
tgcactgggggggacacagtg

SEQ ID NO: 9332 - RNA, 21 nt, synthetic construct
  misc_feature 1..21: note = Synthetic
  source 1..21: mol_type = other RNA
tgcacttcccatcgtggcagc

SEQ ID NO: 9333 - RNA, 21 nt, synthetic construct
  misc_feature 1..21: note = Synthetic
  source 1..21: mol_type = other RNA
tgcagaccaaggaggggcggg

SEQ ID NO: 9334 - RNA, 21 nt, synthetic construct
  misc_feature 1..21: note = Synthetic
  source 1..21: mol_type = other RNA
tgcagacgtgggaacagccgc

SEQ ID NO: 9335 - RNA, 21 nt, synthetic construct
  misc_feature 1..21: note = Synthetic
  source 1..21: mol_type = other RNA
tgcagactttgtccagggtga

SEQ ID NO: 9336 - RNA, 21 nt, synthetic construct
  misc_feature 1..21: note = Synthetic
  source 1..21: mol_type = other RNA
tgcagatcattctctgggaca

SEQ ID NO: 9337 - RNA, 21 nt, synthetic construct
  misc_feature 1..21: note = Synthetic
  source 1..21: mol_type = other RNA
tgcagcctcagcctctcttgg

SEQ ID NO: 9338 - RNA, 21 nt, synthetic construct
  misc_feature 1..21: note = Synthetic
  source 1..21: mol_type = other RNA
tgcagcctcagcctctgtgag

SEQ ID NO: 9339 - RNA, 21 nt, synthetic construct
  misc_feature 1..21: note = Synthetic
  source 1..21: mol_type = other RNA
tgcagcggttgacacggcccc

SEQ ID NO: 9340 - RNA, 21 nt, synthetic construct
  misc_feature 1..21: note = Synthetic
  source 1..21: mol_type = other RNA
tgcaggccacgtgtcctcacg

SEQ ID NO: 9341 - RNA, 21 nt, synthetic construct
  misc_feature 1..21: note = Synthetic
  source 1..21: mol_type = other RNA
tgcaggccttcgtgtgggggt

SEQ ID NO: 9342 - RNA, 21 nt, synthetic construct
  misc_feature 1..21: note = Synthetic
  source 1..21: mol_type = other RNA
tgcaggtgacagacaagcacg

SEQ ID NO: 9343 - RNA, 21 nt, synthetic construct
  misc_feature 1..21: note = Synthetic
  source 1..21: mol_type = other RNA
tgcaggtggagctgttgcact

SEQ ID NO: 9344 - RNA, 21 nt, synthetic construct
  misc_feature 1..21: note = Synthetic
  source 1..21: mol_type = other RNA
tgcaggtgtcgggatcctgac

SEQ ID NO: 9345 - RNA, 21 nt, synthetic construct
  misc_feature 1..21: note = Synthetic
  source 1..21: mol_type = other RNA
tgcagtcatattcccggtcac

SEQ ID NO: 9346 - RNA, 21 nt, synthetic construct
  misc_feature 1..21: note = Synthetic
  source 1..21: mol_type = other RNA
tgcagtccccgccgcggcgag

SEQ ID NO: 9347 - RNA, 21 nt, synthetic construct
  misc_feature 1..21: note = Synthetic
  source 1..21: mol_type = other RNA
tgcagtcggggccaccatcac

SEQ ID NO: 9348 - RNA, 21 nt, synthetic construct
  misc_feature 1..21: note = Synthetic
  source 1..21: mol_type = other RNA
tgcagtggcgcaatctcggct

SEQ ID NO: 9349 - RNA, 21 nt, synthetic construct
  misc_feature 1..21: note = Synthetic
  source 1..21: mol_type = other RNA
tgcagtggctcgatcatggct

SEQ ID NO: 9350 - RNA, 21 nt, synthetic construct
  misc_feature 1..21: note = Synthetic
  source 1..21: mol_type = other RNA
tgcagtttccatcagagcact

SEQ ID NO: 9351 - RNA, 21 nt, synthetic construct
  misc_feature 1..21: note = Synthetic
  source 1..21: mol_type = other RNA
tgcatagaagaggtaaacacg

SEQ ID NO: 9352 - RNA, 21 nt, synthetic construct
  misc_feature 1..21: note = Synthetic
  source 1..21: mol_type = other RNA
tgcatagaagtggaagcacta

SEQ ID NO: 9353 - RNA, 21 nt, synthetic construct
  misc_feature 1..21: note = Synthetic
  source 1..21: mol_type = other RNA
tgcatgggcactgtccgaagc

SEQ ID NO: 9354 - RNA, 21 nt, synthetic construct
  misc_feature 1..21: note = Synthetic
  source 1..21: mol_type = other RNA
tgcatggtttttttttgtttt

SEQ ID NO: 9355 - RNA, 21 nt, synthetic construct
  misc_feature 1..21: note = Synthetic
  source 1..21: mol_type = other RNA
tgcatgttttaaacacatacc

SEQ ID NO: 9356 - RNA, 21 nt, synthetic construct
  misc_feature 1..21: note = Synthetic
  source 1..21: mol_type = other RNA
tgcattcgccgctgtgacact

SEQ ID NO: 9357 - RNA, 21 nt, synthetic construct
  misc_feature 1..21: note = Synthetic
  source 1..21: mol_type = other RNA
tgcatttcccgtcttggcact

SEQ ID NO: 9358 - RNA, 21 nt, synthetic construct
  misc_feature 1..21: note = Synthetic
  source 1..21: mol_type = other RNA
tgccaaatgtacacagtgtac

SEQ ID NO: 9359 - RNA, 21 nt, synthetic construct
  misc_feature 1..21: note = Synthetic
  source 1..21: mol_type = other RNA
tgccaatcccttgtgacatct

SEQ ID NO: 9360 - RNA, 21 nt, synthetic construct
  misc_feature 1..21: note = Synthetic
  source 1..21: mol_type = other RNA
tgccaccacggattcagccag

SEQ ID NO: 9361 - RNA, 21 nt, synthetic construct
  misc_feature 1..21: note = Synthetic
  source 1..21: mol_type = other RNA
tgccaccgtacccagctgatt

SEQ ID NO: 9362 - RNA, 21 nt, synthetic construct
  misc_feature 1..21: note = Synthetic
  source 1..21: mol_type = other RNA
tgccagcaacgtcgcccagag

SEQ ID NO: 9363 - RNA, 21 nt, synthetic construct
  misc_feature 1..21: note = Synthetic
  source 1..21: mol_type = other RNA
tgccaggcagtgtcccgaccc

SEQ ID NO: 9364 - RNA, 21 nt, synthetic construct
  misc_feature 1..21: note = Synthetic
  source 1..21: mol_type = other RNA
tgccatcgcagacccacttgt

SEQ ID NO: 9365 - RNA, 21 nt, synthetic construct
  misc_feature 1..21: note = Synthetic
  source 1..21: mol_type = other RNA
tgccatctgctgttgtgtgtt

SEQ ID NO: 9366 - RNA, 21 nt, synthetic construct
  misc_feature 1..21: note = Synthetic
  source 1..21: mol_type = other RNA
tgccatggatgcagtttccat

SEQ ID NO: 9367 - RNA, 21 nt, synthetic construct
  misc_feature 1..21: note = Synthetic
  source 1..21: mol_type = other RNA
tgccattgggccactgaatgt

SEQ ID NO: 9368 - RNA, 21 nt, synthetic construct
  misc_feature 1..21: note = Synthetic
  source 1..21: mol_type = other RNA
tgcccaggacagagtcggtcc

SEQ ID NO: 9369 - RNA, 21 nt, synthetic construct
  misc_feature 1..21: note = Synthetic
  source 1..21: mol_type = other RNA
tgcccaggctggaaagcagtg

SEQ ID NO: 9370 - RNA, 21 nt, synthetic construct
  misc_feature 1..21: note = Synthetic
  source 1..21: mol_type = other RNA
tgcccaggctggagtgcagtg

SEQ ID NO: 9371 - RNA, 21 nt, synthetic construct
  misc_feature 1..21: note = Synthetic
  source 1..21: mol_type = other RNA
tgcccccgagaccagagaccc

SEQ ID NO: 9372 - RNA, 21 nt, synthetic construct
  misc_feature 1..21: note = Synthetic
  source 1..21: mol_type = other RNA
tgcccccgttgacatcgatgc

SEQ ID NO: 9373 - RNA, 21 nt, synthetic construct
  misc_feature 1..21: note = Synthetic
  source 1..21: mol_type = other RNA
tgcccctctctgtccccggca

SEQ ID NO: 9374 - RNA, 21 nt, synthetic construct
  misc_feature 1..21: note = Synthetic
  source 1..21: mol_type = other RNA
tgcccgccaccacgcccggct

SEQ ID NO: 9375 - RNA, 21 nt, synthetic construct
  misc_feature 1..21: note = Synthetic
  source 1..21: mol_type = other RNA
tgccgagagatgcacttccca

SEQ ID NO: 9376 - RNA, 21 nt, synthetic construct
  misc_feature 1..21: note = Synthetic
  source 1..21: mol_type = other RNA
tgccggctgccatggatgcag

SEQ ID NO: 9377 - RNA, 21 nt, synthetic construct
  misc_feature 1..21: note = Synthetic
  source 1..21: mol_type = other RNA
tgccggttggtgaagaagagg

SEQ ID NO: 9378 - RNA, 21 nt, synthetic construct
  misc_feature 1..21: note = Synthetic
  source 1..21: mol_type = other RNA
tgccgtccgggcaggcgcagg

SEQ ID NO: 9379 - RNA, 21 nt, synthetic construct
  misc_feature 1..21: note = Synthetic
  source 1..21: mol_type = other RNA
tgcctcagcctcccaagtagc

SEQ ID NO: 9380 - RNA, 21 nt, synthetic construct
  misc_feature 1..21: note = Synthetic
  source 1..21: mol_type = other RNA
tgcctcagcctcccgagtagc

SEQ ID NO: 9381 - RNA, 21 nt, synthetic construct
  misc_feature 1..21: note = Synthetic
  source 1..21: mol_type = other RNA
tgcctcccagatgaataaata

SEQ ID NO: 9382 - RNA, 21 nt, synthetic construct
  misc_feature 1..21: note = Synthetic
  source 1..21: mol_type = other RNA
tgcctctgggaagtggcatca

SEQ ID NO: 9383 - RNA, 21 nt, synthetic construct
  misc_feature 1..21: note = Synthetic
  source 1..21: mol_type = other RNA
tgcctgagctcaaaccatcct

SEQ ID NO: 9384 - RNA, 21 nt, synthetic construct
  misc_feature 1..21: note = Synthetic
  source 1..21: mol_type = other RNA
tgcctggccagaggccatggg

SEQ ID NO: 9385 - RNA, 21 nt, synthetic construct
  misc_feature 1..21: note = Synthetic
  source 1..21: mol_type = other RNA
tgcgcccggcctcaccgtgca

SEQ ID NO: 9386 - RNA, 21 nt, synthetic construct
  misc_feature 1..21: note = Synthetic
  source 1..21: mol_type = other RNA
tgcggactgcagtggcgcaat

SEQ ID NO: 9387 - RNA, 21 nt, synthetic construct
  misc_feature 1..21: note = Synthetic
  source 1..21: mol_type = other RNA
tgcggccactcatccgagcca

SEQ ID NO: 9388 - RNA, 21 nt, synthetic construct
  misc_feature 1..21: note = Synthetic
  source 1..21: mol_type = other RNA
tgcggggcagggaggcacaga

SEQ ID NO: 9389 - RNA, 21 nt, synthetic construct
  misc_feature 1..21: note = Synthetic
  source 1..21: mol_type = other RNA
tgctcaggcctggtctccaac

SEQ ID NO: 9390 - RNA, 21 nt, synthetic construct
  misc_feature 1..21: note = Synthetic
  source 1..21: mol_type = other RNA
tgctcagggtggtcctctcac

SEQ ID NO: 9391 - RNA, 21 nt, synthetic construct
  misc_feature 1..21: note = Synthetic
  source 1..21: mol_type = other RNA
tgctccgaaaccagaaaggct

SEQ ID NO: 9392 - RNA, 21 nt, synthetic construct
  misc_feature 1..21: note = Synthetic
  source 1..21: mol_type = other RNA
tgctcgcagcctctgccaggc

SEQ ID NO: 9393 - RNA, 21 nt, synthetic construct
  misc_feature 1..21: note = Synthetic
  source 1..21: mol_type = other RNA
tgctcgtctgagccgttgtcg

SEQ ID NO: 9394 - RNA, 21 nt, synthetic construct
  misc_feature 1..21: note = Synthetic
  source 1..21: mol_type = other RNA
tgctgatgacggtgtcatagg

SEQ ID NO: 9395 - RNA, 21 nt, synthetic construct
  misc_feature 1..21: note = Synthetic
  source 1..21: mol_type = other RNA
tgctgatgcaccatgcatggt

SEQ ID NO: 9396 - RNA, 21 nt, synthetic construct
  misc_feature 1..21: note = Synthetic
  source 1..21: mol_type = other RNA
tgctgcagatcattctctggg

SEQ ID NO: 9397 - RNA, 21 nt, synthetic construct
  misc_feature 1..21: note = Synthetic
  source 1..21: mol_type = other RNA
tgctggccacctccgtgtcca

SEQ ID NO: 9398 - RNA, 21 nt, synthetic construct
  misc_feature 1..21: note = Synthetic
  source 1..21: mol_type = other RNA
tgctgggattacaggcgtgag

SEQ ID NO: 9399 - RNA, 21 nt, synthetic construct
  misc_feature 1..21: note = Synthetic
  source 1..21: mol_type = other RNA
tgctgtggatccagtccacag

SEQ ID NO: 9400 - RNA, 21 nt, synthetic construct
  misc_feature 1..21: note = Synthetic
  source 1..21: mol_type = other RNA
tgctgtgtcctagctggaaac

SEQ ID NO: 9401 - RNA, 21 nt, synthetic construct
  misc_feature 1..21: note = Synthetic
  source 1..21: mol_type = other RNA
tgctgtgtccttacggctgtg

SEQ ID NO: 9402 - RNA, 21 nt, synthetic construct
  misc_feature 1..21: note = Synthetic
  source 1..21: mol_type = other RNA
tgctgttgatgttcttaagcc

SEQ ID NO: 9403 - RNA, 21 nt, synthetic construct
  misc_feature 1..21: note = Synthetic
  source 1..21: mol_type = other RNA
tgctgttgtgtgttgaaagcc

SEQ ID NO: 9404 - RNA, 21 nt, synthetic construct
  misc_feature 1..21: note = Synthetic
  source 1..21: mol_type = other RNA
tgcttctctgggcctgacatc

SEQ ID NO: 9405 - RNA, 21 nt, synthetic construct
  misc_feature 1..21: note = Synthetic
  source 1..21: mol_type = other RNA
tgcttgagatggagtgaagtt

SEQ ID NO: 9406 - RNA, 21 nt, synthetic construct
  misc_feature 1..21: note = Synthetic
  source 1..21: mol_type = other RNA
tgctttggtcttctctgtctt

SEQ ID NO: 9407 - RNA, 21 nt, synthetic construct
  misc_feature 1..21: note = Synthetic
  source 1..21: mol_type = other RNA
tggaaaccctggcttcccgcg

SEQ ID NO: 9408 - RNA, 21 nt, synthetic construct
  misc_feature 1..21: note = Synthetic
  source 1..21: mol_type = other RNA
tggaaagcagtggcataatca

SEQ ID NO: 9409 - RNA, 21 nt, synthetic construct
  misc_feature 1..21: note = Synthetic
  source 1..21: mol_type = other RNA
tggaacacgtaaagaccccta

SEQ ID NO: 9410 - RNA, 21 nt, synthetic construct
  misc_feature 1..21: note = Synthetic
  source 1..21: mol_type = other RNA
tggaactcgaaggccgagcag

SEQ ID NO: 9411 - RNA, 21 nt, synthetic construct
  misc_feature 1..21: note = Synthetic
  source 1..21: mol_type = other RNA
tggaactcgtttctttcgcat

SEQ ID NO: 9412 - RNA, 21 nt, synthetic construct
  misc_feature 1..21: note = Synthetic
  source 1..21: mol_type = other RNA
tggaagagaaccatatcctct

SEQ ID NO: 9413 - RNA, 21 nt, synthetic construct
  misc_feature 1..21: note = Synthetic
  source 1..21: mol_type = other RNA
tggaagcactaggtgggcgga

SEQ ID NO: 9414 - RNA, 21 nt, synthetic construct
  misc_feature 1..21: note = Synthetic
  source 1..21: mol_type = other RNA
tggaagccgtcggggcacagg

SEQ ID NO: 9415 - RNA, 21 nt, synthetic construct
  misc_feature 1..21: note = Synthetic
  source 1..21: mol_type = other RNA
tggaagccttcctcacactgg

SEQ ID NO: 9416 - RNA, 21 nt, synthetic construct
  misc_feature 1..21: note = Synthetic
  source 1..21: mol_type = other RNA
tggaagctggcgggaccacag

SEQ ID NO: 9417 - RNA, 21 nt, synthetic construct
  misc_feature 1..21: note = Synthetic
  source 1..21: mol_type = other RNA
tggaagtgggtaggggtcggg

SEQ ID NO: 9418 - RNA, 21 nt, synthetic construct
  misc_feature 1..21: note = Synthetic
  source 1..21: mol_type = other RNA
tggaattcgtcagggcgacag

SEQ ID NO: 9419 - RNA, 21 nt, synthetic construct
  misc_feature 1..21: note = Synthetic
  source 1..21: mol_type = other RNA
tggacagagccctcacgctac

SEQ ID NO: 9420 - RNA, 21 nt, synthetic construct
  misc_feature 1..21: note = Synthetic
  source 1..21: mol_type = other RNA
tggacctcatcctctgtggtc

SEQ ID NO: 9421 - RNA, 21 nt, synthetic construct
  misc_feature 1..21: note = Synthetic
  source 1..21: mol_type = other RNA
tggagagaaactcaaaacttc

SEQ ID NO: 9422 - RNA, 21 nt, synthetic construct
  misc_feature 1..21: note = Synthetic
  source 1..21: mol_type = other RNA
tggagagaaatggaggtgtca

SEQ ID NO: 9423 - RNA, 21 nt, synthetic construct
  misc_feature 1..21: note = Synthetic
  source 1..21: mol_type = other RNA
tggagcccacagccttgcagg

SEQ ID NO: 9424 - RNA, 21 nt, synthetic construct
  misc_feature 1..21: note = Synthetic
  source 1..21: mol_type = other RNA
tggagccgttctccctgaata

SEQ ID NO: 9425 - RNA, 21 nt, synthetic construct
  misc_feature 1..21: note = Synthetic
  source 1..21: mol_type = other RNA
tggagctgacctttagcctga

SEQ ID NO: 9426 - RNA, 21 nt, synthetic construct
  misc_feature 1..21: note = Synthetic
  source 1..21: mol_type = other RNA
tggagctgttgcactggaagc

SEQ ID NO: 9427 - RNA, 21 nt, synthetic construct
  misc_feature 1..21: note = Synthetic
  source 1..21: mol_type = other RNA
tggaggatttatttatttttt

SEQ ID NO: 9428 - RNA, 21 nt, synthetic construct
  misc_feature 1..21: note = Synthetic
  source 1..21: mol_type = other RNA
tggaggcatttgcatagaagt

SEQ ID NO: 9429 - RNA, 21 nt, synthetic construct
  misc_feature 1..21: note = Synthetic
  source 1..21: mol_type = other RNA
tggaggtgtcatcctggtccc

SEQ ID NO: 9430 - RNA, 21 nt, synthetic construct
  misc_feature 1..21: note = Synthetic
  source 1..21: mol_type = other RNA
tggagtcaacccagtagaggc

SEQ ID NO: 9431 - RNA, 21 nt, synthetic construct
  misc_feature 1..21: note = Synthetic
  source 1..21: mol_type = other RNA
tggagtgaagtttggagtcaa

SEQ ID NO: 9432 - RNA, 21 nt, synthetic construct
  misc_feature 1..21: note = Synthetic
  source 1..21: mol_type = other RNA
tggagtgcagtggctcgatca

SEQ ID NO: 9433 - RNA, 21 nt, synthetic construct
  misc_feature 1..21: note = Synthetic
  source 1..21: mol_type = other RNA
tggagtggatgcactcgccac

SEQ ID NO: 9434 - RNA, 21 nt, synthetic construct
  misc_feature 1..21: note = Synthetic
  source 1..21: mol_type = other RNA
tggatccagtccacagccagc

SEQ ID NO: 9435 - RNA, 21 nt, synthetic construct
  misc_feature 1..21: note = Synthetic
  source 1..21: mol_type = other RNA
tggatgaggcagggccagggg

SEQ ID NO: 9436 - RNA, 21 nt, synthetic construct
  misc_feature 1..21: note = Synthetic
  source 1..21: mol_type = other RNA
tggatgcactcgccacttagg

SEQ ID NO: 9437 - RNA, 21 nt, synthetic construct
  misc_feature 1..21: note = Synthetic
  source 1..21: mol_type = other RNA
tggatgcagtttccatcagag

SEQ ID NO: 9438 - RNA, 21 nt, synthetic construct
  misc_feature 1..21: note = Synthetic
  source 1..21: mol_type = other RNA
tggatgtctcctgggtggcca

SEQ ID NO: 9439 - RNA, 21 nt, synthetic construct
  misc_feature 1..21: note = Synthetic
  source 1..21: mol_type = other RNA
tggatgtctctgctgatgacg

SEQ ID NO: 9440 - RNA, 21 nt, synthetic construct
  misc_feature 1..21: note = Synthetic
  source 1..21: mol_type = other RNA
tggcaaatgtggacctcatcc

SEQ ID NO: 9441 - RNA, 21 nt, synthetic construct
  misc_feature 1..21: note = Synthetic
  source 1..21: mol_type = other RNA
tggcactcagcgctgccatcg

SEQ ID NO: 9442 - RNA, 21 nt, synthetic construct
  misc_feature 1..21: note = Synthetic
  source 1..21: mol_type = other RNA
tggcactgaaaatggcttcgt

SEQ ID NO: 9443 - RNA, 21 nt, synthetic construct
  misc_feature 1..21: note = Synthetic
  source 1..21: mol_type = other RNA
tggcactggaactcgtttctt

SEQ ID NO: 9444 - RNA, 21 nt, synthetic construct
  misc_feature 1..21: note = Synthetic
  source 1..21: mol_type = other RNA
tggcacttgtagccaccctcc

SEQ ID NO: 9445 - RNA, 21 nt, synthetic construct
  misc_feature 1..21: note = Synthetic
  source 1..21: mol_type = other RNA
tggcagccgccattgctcagg

SEQ ID NO: 9446 - RNA, 21 nt, synthetic construct
  misc_feature 1..21: note = Synthetic
  source 1..21: mol_type = other RNA
tggcagcgaaactcgtcctgg

SEQ ID NO: 9447 - RNA, 21 nt, synthetic construct
  misc_feature 1..21: note = Synthetic
  source 1..21: mol_type = other RNA
tggcaggcaatgctttggtct

SEQ ID NO: 9448 - RNA, 21 nt, synthetic construct
  misc_feature 1..21: note = Synthetic
  source 1..21: mol_type = other RNA
tggcagttctcgatattcacg

SEQ ID NO: 9449 - RNA, 21 nt, synthetic construct
  misc_feature 1..21: note = Synthetic
  source 1..21: mol_type = other RNA
tggcataatcatagctcacga

SEQ ID NO: 9450 - RNA, 21 nt, synthetic construct
  misc_feature 1..21: note = Synthetic
  source 1..21: mol_type = other RNA
tggcatcatttggtgaatgag

SEQ ID NO: 9451 - RNA, 21 nt, synthetic construct
  misc_feature 1..21: note = Synthetic
  source 1..21: mol_type = other RNA
tggccaaattcattttttaag

SEQ ID NO: 9452 - RNA, 21 nt, synthetic construct
  misc_feature 1..21: note = Synthetic
  source 1..21: mol_type = other RNA
tggccacagcgcagttttcct

SEQ ID NO: 9453 - RNA, 21 nt, synthetic construct
  misc_feature 1..21: note = Synthetic
  source 1..21: mol_type = other RNA
tggccacaggacagccttgct

SEQ ID NO: 9454 - RNA, 21 nt, synthetic construct
  misc_feature 1..21: note = Synthetic
  source 1..21: mol_type = other RNA
tggccacctccgtgtccagag

SEQ ID NO: 9455 - RNA, 21 nt, synthetic construct
  misc_feature 1..21: note = Synthetic
  source 1..21: mol_type = other RNA
tggccactgcagcctcagcct

SEQ ID NO: 9456 - RNA, 21 nt, synthetic construct
  misc_feature 1..21: note = Synthetic
  source 1..21: mol_type = other RNA
tggccagaggccatgggctgc

SEQ ID NO: 9457 - RNA, 21 nt, synthetic construct
  misc_feature 1..21: note = Synthetic
  source 1..21: mol_type = other RNA
tggccagcagcatgccgtccg

SEQ ID NO: 9458 - RNA, 21 nt, synthetic construct
  misc_feature 1..21: note = Synthetic
  source 1..21: mol_type = other RNA
tggccatcgcacctccagaac

SEQ ID NO: 9459 - RNA, 21 nt, synthetic construct
  misc_feature 1..21: note = Synthetic
  source 1..21: mol_type = other RNA
tggccccaggcagccgggagg

SEQ ID NO: 9460 - RNA, 21 nt, synthetic construct
  misc_feature 1..21: note = Synthetic
  source 1..21: mol_type = other RNA
tggcccttggcttggagccgt

SEQ ID NO: 9461 - RNA, 21 nt, synthetic construct
  misc_feature 1..21: note = Synthetic
  source 1..21: mol_type = other RNA
tggccgggggcccctctgtga

SEQ ID NO: 9462 - RNA, 21 nt, synthetic construct
  misc_feature 1..21: note = Synthetic
  source 1..21: mol_type = other RNA
tggcctgggatcccatcccaa

SEQ ID NO: 9463 - RNA, 21 nt, synthetic construct
  misc_feature 1..21: note = Synthetic
  source 1..21: mol_type = other RNA
tggcgatggggaggacaatgg

SEQ ID NO: 9464 - RNA, 21 nt, synthetic construct
  misc_feature 1..21: note = Synthetic
  source 1..21: mol_type = other RNA
tggcgcaatctcggctcactg

SEQ ID NO: 9465 - RNA, 21 nt, synthetic construct
  misc_feature 1..21: note = Synthetic
  source 1..21: mol_type = other RNA
tggcgggaccacaggtgagca

SEQ ID NO: 9466 - RNA, 21 nt, synthetic construct
  misc_feature 1..21: note = Synthetic
  source 1..21: mol_type = other RNA
tggcgggagttccccagtcag

SEQ ID NO: 9467 - RNA, 21 nt, synthetic construct
  misc_feature 1..21: note = Synthetic
  source 1..21: mol_type = other RNA
tggctcactgcaacctccacc

SEQ ID NO: 9468 - RNA, 21 nt, synthetic construct
  misc_feature 1..21: note = Synthetic
  source 1..21: mol_type = other RNA
tggctcgatcatggctcactg

SEQ ID NO: 9469 - RNA, 21 nt, synthetic construct
  misc_feature 1..21: note = Synthetic
  source 1..21: mol_type = other RNA
tggctgaagatctcggctgca

SEQ ID NO: 9470 - RNA, 21 nt, synthetic construct
  misc_feature 1..21: note = Synthetic
  source 1..21: mol_type = other RNA
tggctgcaggtgtcgggatcc

SEQ ID NO: 9471 - RNA, 21 nt, synthetic construct
  misc_feature 1..21: note = Synthetic
  source 1..21: mol_type = other RNA
tggctgggtgaggttgtggaa

SEQ ID NO: 9472 - RNA, 21 nt, synthetic construct
  misc_feature 1..21: note = Synthetic
  source 1..21: mol_type = other RNA
tggctgtctagcaaggcttgc

SEQ ID NO: 9473 - RNA, 21 nt, synthetic construct
  misc_feature 1..21: note = Synthetic
  source 1..21: mol_type = other RNA
tggcttaaggaaggtacaaac

SEQ ID NO: 9474 - RNA, 21 nt, synthetic construct
  misc_feature 1..21: note = Synthetic
  source 1..21: mol_type = other RNA
tggcttagagattggtggatg

SEQ ID NO: 9475 - RNA, 21 nt, synthetic construct
  misc_feature 1..21: note = Synthetic
  source 1..21: mol_type = other RNA
tggcttcgttgatgatatctg

SEQ ID NO: 9476 - RNA, 21 nt, synthetic construct
  misc_feature 1..21: note = Synthetic
  source 1..21: mol_type = other RNA
tggcttggagccgttctccct

SEQ ID NO: 9477 - RNA, 21 nt, synthetic construct
  misc_feature 1..21: note = Synthetic
  source 1..21: mol_type = other RNA
tggcttggaggcatttgcata

SEQ ID NO: 9478 - RNA, 21 nt, synthetic construct
  misc_feature 1..21: note = Synthetic
  source 1..21: mol_type = other RNA
tgggaacagccgccgttgttg

SEQ ID NO: 9479 - RNA, 21 nt, synthetic construct
  misc_feature 1..21: note = Synthetic
  source 1..21: mol_type = other RNA
tgggaagtggcatcatttggt

SEQ ID NO: 9480 - RNA, 21 nt, synthetic construct
  misc_feature 1..21: note = Synthetic
  source 1..21: mol_type = other RNA
tgggacaggtcagaccagtag

SEQ ID NO: 9481 - RNA, 21 nt, synthetic construct
  misc_feature 1..21: note = Synthetic
  source 1..21: mol_type = other RNA
tgggactacaggtgcccgcca

SEQ ID NO: 9482 - RNA, 21 nt, synthetic construct
  misc_feature 1..21: note = Synthetic
  source 1..21: mol_type = other RNA
tgggactcatcagagccatcc

SEQ ID NO: 9483 - RNA, 21 nt, synthetic construct
  misc_feature 1..21: note = Synthetic
  source 1..21: mol_type = other RNA
tgggagcacgtcttgggggag

SEQ ID NO: 9484 - RNA, 21 nt, synthetic construct
  misc_feature 1..21: note = Synthetic
  source 1..21: mol_type = other RNA
tgggagcacgtcttgggggga

SEQ ID NO: 9485 - RNA, 21 nt, synthetic construct
  misc_feature 1..21: note = Synthetic
  source 1..21: mol_type = other RNA
tgggatcacaggcacgtgcca

SEQ ID NO: 9486 - RNA, 21 nt, synthetic construct
  misc_feature 1..21: note = Synthetic
  source 1..21: mol_type = other RNA
tgggatcccatcccaacacac

SEQ ID NO: 9487 - RNA, 21 nt, synthetic construct
  misc_feature 1..21: note = Synthetic
  source 1..21: mol_type = other RNA
tgggatctcgctttgttgctc

SEQ ID NO: 9488 - RNA, 21 nt, synthetic construct
  misc_feature 1..21: note = Synthetic
  source 1..21: mol_type = other RNA
tgggattacaggcgtgagcca

SEQ ID NO: 9489 - RNA, 21 nt, synthetic construct
  misc_feature 1..21: note = Synthetic
  source 1..21: mol_type = other RNA
tgggattacaggcgtgaggca

SEQ ID NO: 9490 - RNA, 21 nt, synthetic construct
  misc_feature 1..21: note = Synthetic
  source 1..21: mol_type = other RNA
tgggcaccaggctggtgtcct

SEQ ID NO: 9491 - RNA, 21 nt, synthetic construct
  misc_feature 1..21: note = Synthetic
  source 1..21: mol_type = other RNA
tgggcactgtccgaagcctgt

SEQ ID NO: 9492 - RNA, 21 nt, synthetic construct
  misc_feature 1..21: note = Synthetic
  source 1..21: mol_type = other RNA
tgggcagggacgggactccag

SEQ ID NO: 9493 - RNA, 21 nt, synthetic construct
  misc_feature 1..21: note = Synthetic
  source 1..21: mol_type = other RNA
tgggccaccagctggaagccg

SEQ ID NO: 9494 - RNA, 21 nt, synthetic construct
  misc_feature 1..21: note = Synthetic
  source 1..21: mol_type = other RNA
tgggccactgaatgttttcag

SEQ ID NO: 9495 - RNA, 21 nt, synthetic construct
  misc_feature 1..21: note = Synthetic
  source 1..21: mol_type = other RNA
tgggccagcctcttttcatcc

SEQ ID NO: 9496 - RNA, 21 nt, synthetic construct
  misc_feature 1..21: note = Synthetic
  source 1..21: mol_type = other RNA
tgggcctgacatcccctcccc

SEQ ID NO: 9497 - RNA, 21 nt, synthetic construct
  misc_feature 1..21: note = Synthetic
  source 1..21: mol_type = other RNA
tgggcgagtgggggttgatct

SEQ ID NO: 9498 - RNA, 21 nt, synthetic construct
  misc_feature 1..21: note = Synthetic
  source 1..21: mol_type = other RNA
tgggcggacataaagacgaca

SEQ ID NO: 9499 - RNA, 21 nt, synthetic construct
  misc_feature 1..21: note = Synthetic
  source 1..21: mol_type = other RNA
tgggctcaggcgatcctcctg

SEQ ID NO: 9500 - RNA, 21 nt, synthetic construct
  misc_feature 1..21: note = Synthetic
  source 1..21: mol_type = other RNA
tgggctctgtcaagctgggtg

SEQ ID NO: 9501 - RNA, 21 nt, synthetic construct
  misc_feature 1..21: note = Synthetic
  source 1..21: mol_type = other RNA
tgggctgctgatgcaccatgc

SEQ ID NO: 9502 - RNA, 21 nt, synthetic construct
  misc_feature 1..21: note = Synthetic
  source 1..21: mol_type = other RNA
tgggcttcttctcatttcctc

SEQ ID NO: 9503 - RNA, 21 nt, synthetic construct
  misc_feature 1..21: note = Synthetic
  source 1..21: mol_type = other RNA
tggggaagtgaatggcttgga

SEQ ID NO: 9504 - RNA, 21 nt, synthetic construct
  misc_feature 1..21: note = Synthetic
  source 1..21: mol_type = other RNA
tggggacaattgccaatccct

SEQ ID NO: 9505 - RNA, 21 nt, synthetic construct
  misc_feature 1..21: note = Synthetic
  source 1..21: mol_type = other RNA
tggggacagtaggttttcagc

SEQ ID NO: 9506 - RNA, 21 nt, synthetic construct
  misc_feature 1..21: note = Synthetic
  source 1..21: mol_type = other RNA
tggggacggaggtgtcgccac

SEQ ID NO: 9507 - RNA, 21 nt, synthetic construct
  misc_feature 1..21: note = Synthetic
  source 1..21: mol_type = other RNA
tggggaggacaatggacagag

SEQ ID NO: 9508 - RNA, 21 nt, synthetic construct
  misc_feature 1..21: note = Synthetic
  source 1..21: mol_type = other RNA
tggggatgaggctggtgtact

SEQ ID NO: 9509 - RNA, 21 nt, synthetic construct
  misc_feature 1..21: note = Synthetic
  source 1..21: mol_type = other RNA
tggggcgagggcgccccccag

SEQ ID NO: 9510 - RNA, 21 nt, synthetic construct
  misc_feature 1..21: note = Synthetic
  source 1..21: mol_type = other RNA
tgggggagcacgtctcctggg

SEQ ID NO: 9511 - RNA, 21 nt, synthetic construct
  misc_feature 1..21: note = Synthetic
  source 1..21: mol_type = other RNA
tgggggatgcaggtggagctg

SEQ ID NO: 9512 - RNA, 21 nt, synthetic construct
  misc_feature 1..21: note = Synthetic
  source 1..21: mol_type = other RNA
tggggggacagccttgctcgt

SEQ ID NO: 9513 - RNA, 21 nt, synthetic construct
  misc_feature 1..21: note = Synthetic
  source 1..21: mol_type = other RNA
tgggggggacacagtgttttg

SEQ ID NO: 9514 - RNA, 21 nt, synthetic construct
  misc_feature 1..21: note = Synthetic
  source 1..21: mol_type = other RNA
tgggggtccagctggaagcct

SEQ ID NO: 9515 - RNA, 21 nt, synthetic construct
  misc_feature 1..21: note = Synthetic
  source 1..21: mol_type = other RNA
tgggggttgatctgcggggca

SEQ ID NO: 9516 - RNA, 21 nt, synthetic construct
  misc_feature 1..21: note = Synthetic
  source 1..21: mol_type = other RNA
tggggtcttactatgttgccc

SEQ ID NO: 9517 - RNA, 21 nt, synthetic construct
  misc_feature 1..21: note = Synthetic
  source 1..21: mol_type = other RNA
tgggtaggggtcgggaggatg

SEQ ID NO: 9518 - RNA, 21 nt, synthetic construct
  misc_feature 1..21: note = Synthetic
  source 1..21: mol_type = other RNA
tgggtcatgattcgggggtga

SEQ ID NO: 9519 - RNA, 21 nt, synthetic construct
  misc_feature 1..21: note = Synthetic
  source 1..21: mol_type = other RNA
tgggtccctcgcagagtgtca

SEQ ID NO: 9520 - RNA, 21 nt, synthetic construct
  misc_feature 1..21: note = Synthetic
  source 1..21: mol_type = other RNA
tgggtgaggttgtggaagaga

SEQ ID NO: 9521 - RNA, 21 nt, synthetic construct
  misc_feature 1..21: note = Synthetic
  source 1..21: mol_type = other RNA
tgggtgcaggccacgtgtcct

SEQ ID NO: 9522 - RNA, 21 nt, synthetic construct
  misc_feature 1..21: note = Synthetic
  source 1..21: mol_type = other RNA
tgggtgctgcagatcattctc

SEQ ID NO: 9523 - RNA, 21 nt, synthetic construct
  misc_feature 1..21: note = Synthetic
  source 1..21: mol_type = other RNA
tgggtggccactgcagcctca

SEQ ID NO: 9524 - RNA, 21 nt, synthetic construct
  misc_feature 1..21: note = Synthetic
  source 1..21: mol_type = other RNA
tgggtgggtcatgattcgggg

SEQ ID NO: 9525 - RNA, 21 nt, synthetic construct
  misc_feature 1..21: note = Synthetic
  source 1..21: mol_type = other RNA
tgggttcatctgaccagtccc

SEQ ID NO: 9526 - RNA, 21 nt, synthetic construct
  misc_feature 1..21: note = Synthetic
  source 1..21: mol_type = other RNA
tggtatccgcaacagagacag

SEQ ID NO: 9527 - RNA, 21 nt, synthetic construct
  misc_feature 1..21: note = Synthetic
  source 1..21: mol_type = other RNA
tggtccccccgggcctgtttc

SEQ ID NO: 9528 - RNA, 21 nt, synthetic construct
  misc_feature 1..21: note = Synthetic
  source 1..21: mol_type = other RNA
tggtcccgcactctttgatgg

SEQ ID NO: 9529 - RNA, 21 nt, synthetic construct
  misc_feature 1..21: note = Synthetic
  source 1..21: mol_type = other RNA
tggtcctctcacaccagttca

SEQ ID NO: 9530 - RNA, 21 nt, synthetic construct
  misc_feature 1..21: note = Synthetic
  source 1..21: mol_type = other RNA
tggtctccaactcctgaactc

SEQ ID NO: 9531 - RNA, 21 nt, synthetic construct
  misc_feature 1..21: note = Synthetic
  source 1..21: mol_type = other RNA
tggtctcgatctcctgacctc

SEQ ID NO: 9532 - RNA, 21 nt, synthetic construct
  misc_feature 1..21: note = Synthetic
  source 1..21: mol_type = other RNA
tggtctcggtgccaccacgga

SEQ ID NO: 9533 - RNA, 21 nt, synthetic construct
  misc_feature 1..21: note = Synthetic
  source 1..21: mol_type = other RNA
tggtcttccggttgcccccgt

SEQ ID NO: 9534 - RNA, 21 nt, synthetic construct
  misc_feature 1..21: note = Synthetic
  source 1..21: mol_type = other RNA
tggtcttctctgtctttgaat

SEQ ID NO: 9535 - RNA, 21 nt, synthetic construct
  misc_feature 1..21: note = Synthetic
  source 1..21: mol_type = other RNA
tggtcttctgatagacggggt

SEQ ID NO: 9536 - RNA, 21 nt, synthetic construct
  misc_feature 1..21: note = Synthetic
  source 1..21: mol_type = other RNA
tggtgaagaagaggtaggcga

SEQ ID NO: 9537 - RNA, 21 nt, synthetic construct
  misc_feature 1..21: note = Synthetic
  source 1..21: mol_type = other RNA
tggtgaatgagtttggtctcg

SEQ ID NO: 9538 - RNA, 21 nt, synthetic construct
  misc_feature 1..21: note = Synthetic
  source 1..21: mol_type = other RNA
tggtgagacattgtcactatc

SEQ ID NO: 9539 - RNA, 21 nt, synthetic construct
  misc_feature 1..21: note = Synthetic
  source 1..21: mol_type = other RNA
tggtgagcccaggggtggccc

SEQ ID NO: 9540 - RNA, 21 nt, synthetic construct
  misc_feature 1..21: note = Synthetic
  source 1..21: mol_type = other RNA
tggtgccatctgctgttgtgt

SEQ ID NO: 9541 - RNA, 21 nt, synthetic construct
  misc_feature 1..21: note = Synthetic
  source 1..21: mol_type = other RNA
tggtggatgaggcagggccag

SEQ ID NO: 9542 - RNA, 21 nt, synthetic construct
  misc_feature 1..21: note = Synthetic
  source 1..21: mol_type = other RNA
tggtggggcgagggcgccccc

SEQ ID NO: 9543 - RNA, 21 nt, synthetic construct
  misc_feature 1..21: note = Synthetic
  source 1..21: mol_type = other RNA
tggtgtactcgctccggtcca

SEQ ID NO: 9544 - RNA, 21 nt, synthetic construct
  misc_feature 1..21: note = Synthetic
  source 1..21: mol_type = other RNA
tggtgtcctgacagccacacc

SEQ ID NO: 9545 - RNA, 21 nt, synthetic construct
  misc_feature 1..21: note = Synthetic
  source 1..21: mol_type = other RNA
tggttgtggcaaatgtggacc

SEQ ID NO: 9546 - RNA, 21 nt, synthetic construct
  misc_feature 1..21: note = Synthetic
  source 1..21: mol_type = other RNA
tggttgtgtgctgtgtcctta

SEQ ID NO: 9547 - RNA, 21 nt, synthetic construct
  misc_feature 1..21: note = Synthetic
  source 1..21: mol_type = other RNA
tggtttaaaaagtgacaccca

SEQ ID NO: 9548 - RNA, 21 nt, synthetic construct
  misc_feature 1..21: note = Synthetic
  source 1..21: mol_type = other RNA
tggtttttgtagagatgggat

SEQ ID NO: 9549 - RNA, 21 nt, synthetic construct
  misc_feature 1..21: note = Synthetic
  source 1..21: mol_type = other RNA
tggtttttttttgtttttttt

SEQ ID NO: 9550 - RNA, 21 nt, synthetic construct
  misc_feature 1..21: note = Synthetic
  source 1..21: mol_type = other RNA
tgtacaactctgaactgagaa

SEQ ID NO: 9551 - RNA, 21 nt, synthetic construct
  misc_feature 1..21: note = Synthetic
  source 1..21: mol_type = other RNA
tgtacacagtgtacaactctg

SEQ ID NO: 9552 - RNA, 21 nt, synthetic construct
  misc_feature 1..21: note = Synthetic
  source 1..21: mol_type = other RNA
tgtacagggacgcatttacgt

SEQ ID NO: 9553 - RNA, 21 nt, synthetic construct
  misc_feature 1..21: note = Synthetic
  source 1..21: mol_type = other RNA
tgtacataaagaagaggcatt

SEQ ID NO: 9554 - RNA, 21 nt, synthetic construct
  misc_feature 1..21: note = Synthetic
  source 1..21: mol_type = other RNA
tgtactcgctccggtccagcg

SEQ ID NO: 9555 - RNA, 21 nt, synthetic construct
  misc_feature 1..21: note = Synthetic
  source 1..21: mol_type = other RNA
tgtagagatgggatctcgctt

SEQ ID NO: 9556 - RNA, 21 nt, synthetic construct
  misc_feature 1..21: note = Synthetic
  source 1..21: mol_type = other RNA
tgtagccaccctccaggttca

SEQ ID NO: 9557 - RNA, 21 nt, synthetic construct
  misc_feature 1..21: note = Synthetic
  source 1..21: mol_type = other RNA
tgtagccgtcctggttgtggc

SEQ ID NO: 9558 - RNA, 21 nt, synthetic construct
  misc_feature 1..21: note = Synthetic
  source 1..21: mol_type = other RNA
tgtaggagatgcatttcccgt

SEQ ID NO: 9559 - RNA, 21 nt, synthetic construct
  misc_feature 1..21: note = Synthetic
  source 1..21: mol_type = other RNA
tgtagggagaggcacgctctg

SEQ ID NO: 9560 - RNA, 21 nt, synthetic construct
  misc_feature 1..21: note = Synthetic
  source 1..21: mol_type = other RNA
tgtatatatatatatataagt

SEQ ID NO: 9561 - RNA, 21 nt, synthetic construct
  misc_feature 1..21: note = Synthetic
  source 1..21: mol_type = other RNA
tgtatgtcgcggaggcggctc

SEQ ID NO: 9562 - RNA, 21 nt, synthetic construct
  misc_feature 1..21: note = Synthetic
  source 1..21: mol_type = other RNA
tgtatttctgaaatagggtct

SEQ ID NO: 9563 - RNA, 21 nt, synthetic construct
  misc_feature 1..21: note = Synthetic
  source 1..21: mol_type = other RNA
tgtatttttagtagagacggg

SEQ ID NO: 9564 - RNA, 21 nt, synthetic construct
  misc_feature 1..21: note = Synthetic
  source 1..21: mol_type = other RNA
tgtcaaagttgatgctgttga

SEQ ID NO: 9565 - RNA, 21 nt, synthetic construct
  misc_feature 1..21: note = Synthetic
  source 1..21: mol_type = other RNA
tgtcaagctgggtgctgcaga

SEQ ID NO: 9566 - RNA, 21 nt, synthetic construct
  misc_feature 1..21: note = Synthetic
  source 1..21: mol_type = other RNA
tgtcacacagctgcccccgag

SEQ ID NO: 9567 - RNA, 21 nt, synthetic construct
  misc_feature 1..21: note = Synthetic
  source 1..21: mol_type = other RNA
tgtcacattaacgcagccaac

SEQ ID NO: 9568 - RNA, 21 nt, synthetic construct
  misc_feature 1..21: note = Synthetic
  source 1..21: mol_type = other RNA
tgtcacggtggagagaaactc

SEQ ID NO: 9569 - RNA, 21 nt, synthetic construct
  misc_feature 1..21: note = Synthetic
  source 1..21: mol_type = other RNA
tgtcactatctccaccgtggt

SEQ ID NO: 9570 - RNA, 21 nt, synthetic construct
  misc_feature 1..21: note = Synthetic
  source 1..21: mol_type = other RNA
tgtcactgtctctccggacat

SEQ ID NO: 9571 - RNA, 21 nt, synthetic construct
  misc_feature 1..21: note = Synthetic
  source 1..21: mol_type = other RNA
tgtcagacagccttgctcgtc

SEQ ID NO: 9572 - RNA, 21 nt, synthetic construct
  misc_feature 1..21: note = Synthetic
  source 1..21: mol_type = other RNA
tgtcataggaagagacgccgt

SEQ ID NO: 9573 - RNA, 21 nt, synthetic construct
  misc_feature 1..21: note = Synthetic
  source 1..21: mol_type = other RNA
tgtcatcctggtccccccggg

SEQ ID NO: 9574 - RNA, 21 nt, synthetic construct
  misc_feature 1..21: note = Synthetic
  source 1..21: mol_type = other RNA
tgtccaaaatactttgtcctc

SEQ ID NO: 9575 - RNA, 21 nt, synthetic construct
  misc_feature 1..21: note = Synthetic
  source 1..21: mol_type = other RNA
tgtccaagcattcgttggtcc

SEQ ID NO: 9576 - RNA, 21 nt, synthetic construct
  misc_feature 1..21: note = Synthetic
  source 1..21: mol_type = other RNA
tgtccacaccattcaggcccc

SEQ ID NO: 9577 - RNA, 21 nt, synthetic construct
  misc_feature 1..21: note = Synthetic
  source 1..21: mol_type = other RNA
tgtccagagcgaccacgttcc

SEQ ID NO: 9578 - RNA, 21 nt, synthetic construct
  misc_feature 1..21: note = Synthetic
  source 1..21: mol_type = other RNA
tgtccagggtgatgcattcgc

SEQ ID NO: 9579 - RNA, 21 nt, synthetic construct
  misc_feature 1..21: note = Synthetic
  source 1..21: mol_type = other RNA
tgtccccggcattcattgaca

SEQ ID NO: 9580 - RNA, 21 nt, synthetic construct
  misc_feature 1..21: note = Synthetic
  source 1..21: mol_type = other RNA
tgtccccttggaacacgtaaa

SEQ ID NO: 9581 - RNA, 21 nt, synthetic construct
  misc_feature 1..21: note = Synthetic
  source 1..21: mol_type = other RNA
tgtcccgacccggatcacgac

SEQ ID NO: 9582 - RNA, 21 nt, synthetic construct
  misc_feature 1..21: note = Synthetic
  source 1..21: mol_type = other RNA
tgtccctggccagcagcatgc

SEQ ID NO: 9583 - RNA, 21 nt, synthetic construct
  misc_feature 1..21: note = Synthetic
  source 1..21: mol_type = other RNA
tgtccctggggacaattgcca

SEQ ID NO: 9584 - RNA, 21 nt, synthetic construct
  misc_feature 1..21: note = Synthetic
  source 1..21: mol_type = other RNA
tgtccgaagcctgttctgcct

SEQ ID NO: 9585 - RNA, 21 nt, synthetic construct
  misc_feature 1..21: note = Synthetic
  source 1..21: mol_type = other RNA
tgtcctagctggaaaccctgg

SEQ ID NO: 9586 - RNA, 21 nt, synthetic construct
  misc_feature 1..21: note = Synthetic
  source 1..21: mol_type = other RNA
tgtcctcaaagacggccaagg

SEQ ID NO: 9587 - RNA, 21 nt, synthetic construct
  misc_feature 1..21: note = Synthetic
  source 1..21: mol_type = other RNA
tgtcctcacggccaaggtaac

SEQ ID NO: 9588 - RNA, 21 nt, synthetic construct
  misc_feature 1..21: note = Synthetic
  source 1..21: mol_type = other RNA
tgtcctgacagccacacctgg

SEQ ID NO: 9589 - RNA, 21 nt, synthetic construct
  misc_feature 1..21: note = Synthetic
  source 1..21: mol_type = other RNA
tgtccttacggctgtggagct

SEQ ID NO: 9590 - RNA, 21 nt, synthetic construct
  misc_feature 1..21: note = Synthetic
  source 1..21: mol_type = other RNA
tgtccttgcagtcatattccc

SEQ ID NO: 9591 - RNA, 21 nt, synthetic construct
  misc_feature 1..21: note = Synthetic
  source 1..21: mol_type = other RNA
tgtccttgcagtcggggccac

SEQ ID NO: 9592 - RNA, 21 nt, synthetic construct
  misc_feature 1..21: note = Synthetic
  source 1..21: mol_type = other RNA
tgtcgcaggcccacagctggg

SEQ ID NO: 9593 - RNA, 21 nt, synthetic construct
  misc_feature 1..21: note = Synthetic
  source 1..21: mol_type = other RNA
tgtcgcagtccacttggccat

SEQ ID NO: 9594 - RNA, 21 nt, synthetic construct
  misc_feature 1..21: note = Synthetic
  source 1..21: mol_type = other RNA
tgtcgccacagagcacagcgg

SEQ ID NO: 9595 - RNA, 21 nt, synthetic construct
  misc_feature 1..21: note = Synthetic
  source 1..21: mol_type = other RNA
tgtcgcccacgtggctgaaga

SEQ ID NO: 9596 - RNA, 21 nt, synthetic construct
  misc_feature 1..21: note = Synthetic
  source 1..21: mol_type = other RNA
tgtcgcccactgcagtccccg

SEQ ID NO: 9597 - RNA, 21 nt, synthetic construct
  misc_feature 1..21: note = Synthetic
  source 1..21: mol_type = other RNA
tgtcgcccaggccagactgcg

SEQ ID NO: 9598 - RNA, 21 nt, synthetic construct
  misc_feature 1..21: note = Synthetic
  source 1..21: mol_type = other RNA
tgtcgcggaggcggctccggg

SEQ ID NO: 9599 - RNA, 21 nt, synthetic construct
  misc_feature 1..21: note = Synthetic
  source 1..21: mol_type = other RNA
tgtcgggaacaggtcgggtgg

SEQ ID NO: 9600 - RNA, 21 nt, synthetic construct
  misc_feature 1..21: note = Synthetic
  source 1..21: mol_type = other RNA
tgtcgggatcctgacactcat

SEQ ID NO: 9601 - RNA, 21 nt, synthetic construct
  misc_feature 1..21: note = Synthetic
  source 1..21: mol_type = other RNA
tgtcgtcgcctttgtgacagg

SEQ ID NO: 9602 - RNA, 21 nt, synthetic construct
  misc_feature 1..21: note = Synthetic
  source 1..21: mol_type = other RNA
tgtctagcaaggcttgcatag

SEQ ID NO: 9603 - RNA, 21 nt, synthetic construct
  misc_feature 1..21: note = Synthetic
  source 1..21: mol_type = other RNA
tgtctcaggcacttaataaat

SEQ ID NO: 9604 - RNA, 21 nt, synthetic construct
  misc_feature 1..21: note = Synthetic
  source 1..21: mol_type = other RNA
tgtctcctgggtggccactgc

SEQ ID NO: 9605 - RNA, 21 nt, synthetic construct
  misc_feature 1..21: note = Synthetic
  source 1..21: mol_type = other RNA
tgtctcgaggggtagctgtag

SEQ ID NO: 9606 - RNA, 21 nt, synthetic construct
  misc_feature 1..21: note = Synthetic
  source 1..21: mol_type = other RNA
tgtctctccggacatcagtgc

SEQ ID NO: 9607 - RNA, 21 nt, synthetic construct
  misc_feature 1..21: note = Synthetic
  source 1..21: mol_type = other RNA
tgtctctgctgatgacggtgt

SEQ ID NO: 9608 - RNA, 21 nt, synthetic construct
  misc_feature 1..21: note = Synthetic
  source 1..21: mol_type = other RNA
tgtctggccaaattcattttt

SEQ ID NO: 9609 - RNA, 21 nt, synthetic construct
  misc_feature 1..21: note = Synthetic
  source 1..21: mol_type = other RNA
tgtctttgaataaaacaaggc

SEQ ID NO: 9610 - RNA, 21 nt, synthetic construct
  misc_feature 1..21: note = Synthetic
  source 1..21: mol_type = other RNA
tgtgaacttgatcggggctgg

SEQ ID NO: 9611 - RNA, 21 nt, synthetic construct
  misc_feature 1..21: note = Synthetic
  source 1..21: mol_type = other RNA
tgtgacacttgaacttgttgg

SEQ ID NO: 9612 - RNA, 21 nt, synthetic construct
  misc_feature 1..21: note = Synthetic
  source 1..21: mol_type = other RNA
tgtgacaggaaccgcggagga

SEQ ID NO: 9613 - RNA, 21 nt, synthetic construct
  misc_feature 1..21: note = Synthetic
  source 1..21: mol_type = other RNA
tgtgacatcttcacgcgggag

SEQ ID NO: 9614 - RNA, 21 nt, synthetic construct
  misc_feature 1..21: note = Synthetic
  source 1..21: mol_type = other RNA
tgtgaggcagctcctcatgtc

SEQ ID NO: 9615 - RNA, 21 nt, synthetic construct
  misc_feature 1..21: note = Synthetic
  source 1..21: mol_type = other RNA
tgtgaggcggttggcactgaa

SEQ ID NO: 9616 - RNA, 21 nt, synthetic construct
  misc_feature 1..21: note = Synthetic
  source 1..21: mol_type = other RNA
tgtgctgtgtccttacggctg

SEQ ID NO: 9617 - RNA, 21 nt, synthetic construct
  misc_feature 1..21: note = Synthetic
  source 1..21: mol_type = other RNA
tgtggaagagaaccatatcct

SEQ ID NO: 9618 - RNA, 21 nt, synthetic construct
  misc_feature 1..21: note = Synthetic
  source 1..21: mol_type = other RNA
tgtggacctcatcctctgtgg

SEQ ID NO: 9619 - RNA, 21 nt, synthetic construct
  misc_feature 1..21: note = Synthetic
  source 1..21: mol_type = other RNA
tgtggagctgacctttagcct

SEQ ID NO: 9620 - RNA, 21 nt, synthetic construct
  misc_feature 1..21: note = Synthetic
  source 1..21: mol_type = other RNA
tgtggatccagtccacagcca

SEQ ID NO: 9621 - RNA, 21 nt, synthetic construct
  misc_feature 1..21: note = Synthetic
  source 1..21: mol_type = other RNA
tgtggcaaatgtggacctcat

SEQ ID NO: 9622 - RNA, 21 nt, synthetic construct
  misc_feature 1..21: note = Synthetic
  source 1..21: mol_type = other RNA
tgtgggggtccagctggaagc

SEQ ID NO: 9623 - RNA, 21 nt, synthetic construct
  misc_feature 1..21: note = Synthetic
  source 1..21: mol_type = other RNA
tgtggtcttctgatagacggg

SEQ ID NO: 9624 - RNA, 21 nt, synthetic construct
  misc_feature 1..21: note = Synthetic
  source 1..21: mol_type = other RNA
tgtgtatatatatatatataa

SEQ ID NO: 9625 - RNA, 21 nt, synthetic construct
  misc_feature 1..21: note = Synthetic
  source 1..21: mol_type = other RNA
tgtgtcacggtggagagaaac

SEQ ID NO: 9626 - RNA, 21 nt, synthetic construct
  misc_feature 1..21: note = Synthetic
  source 1..21: mol_type = other RNA
tgtgtcctagctggaaaccct

SEQ ID NO: 9627 - RNA, 21 nt, synthetic construct
  misc_feature 1..21: note = Synthetic
  source 1..21: mol_type = other RNA
tgtgtccttacggctgtggag

SEQ ID NO: 9628 - RNA, 21 nt, synthetic construct
  misc_feature 1..21: note = Synthetic
  source 1..21: mol_type = other RNA
tgtgtctggccaaattcattt

SEQ ID NO: 9629 - RNA, 21 nt, synthetic construct
  misc_feature 1..21: note = Synthetic
  source 1..21: mol_type = other RNA
tgtgtgctgtgtccttacggc

SEQ ID NO: 9630 - RNA, 21 nt, synthetic construct
  misc_feature 1..21: note = Synthetic
  source 1..21: mol_type = other RNA
tgtgtgtatatatatatatat

SEQ ID NO: 9631 - RNA, 21 nt, synthetic construct
  misc_feature 1..21: note = Synthetic
  source 1..21: mol_type = other RNA
tgtgtgttgaaagccacttgc

SEQ ID NO: 9632 - RNA, 21 nt, synthetic construct
  misc_feature 1..21: note = Synthetic
  source 1..21: mol_type = other RNA
tgtgttgaaagccacttgctt

SEQ ID NO: 9633 - RNA, 21 nt, synthetic construct
  misc_feature 1..21: note = Synthetic
  source 1..21: mol_type = other RNA
tgttagccaggatggtctcga

SEQ ID NO: 9634 - RNA, 21 nt, synthetic construct
  misc_feature 1..21: note = Synthetic
  source 1..21: mol_type = other RNA
tgttcacgccacgtcatcctc

SEQ ID NO: 9635 - RNA, 21 nt, synthetic construct
  misc_feature 1..21: note = Synthetic
  source 1..21: mol_type = other RNA
tgttctgcctcccagatgaat

SEQ ID NO: 9636 - RNA, 21 nt, synthetic construct
  misc_feature 1..21: note = Synthetic
  source 1..21: mol_type = other RNA
tgttcttaagccgccagttct

SEQ ID NO: 9637 - RNA, 21 nt, synthetic construct
  misc_feature 1..21: note = Synthetic
  source 1..21: mol_type = other RNA
tgttgaaagccacttgcttct

SEQ ID NO: 9638 - RNA, 21 nt, synthetic construct
  misc_feature 1..21: note = Synthetic
  source 1..21: mol_type = other RNA
tgttgatgttcttaagccgcc

SEQ ID NO: 9639 - RNA, 21 nt, synthetic construct
  misc_feature 1..21: note = Synthetic
  source 1..21: mol_type = other RNA
tgttgcactggaagctggcgg

SEQ ID NO: 9640 - RNA, 21 nt, synthetic construct
  misc_feature 1..21: note = Synthetic
  source 1..21: mol_type = other RNA
tgttgcagactttgtccaggg

SEQ ID NO: 9641 - RNA, 21 nt, synthetic construct
  misc_feature 1..21: note = Synthetic
  source 1..21: mol_type = other RNA
tgttgcccaggctggaaagca

SEQ ID NO: 9642 - RNA, 21 nt, synthetic construct
  misc_feature 1..21: note = Synthetic
  source 1..21: mol_type = other RNA
tgttgcccaggctggagtgca

SEQ ID NO: 9643 - RNA, 21 nt, synthetic construct
  misc_feature 1..21: note = Synthetic
  source 1..21: mol_type = other RNA
tgttgctcaggcctggtctcc

SEQ ID NO: 9644 - RNA, 21 nt, synthetic construct
  misc_feature 1..21: note = Synthetic
  source 1..21: mol_type = other RNA
tgttgctgtggatccagtcca

SEQ ID NO: 9645 - RNA, 21 nt, synthetic construct
  misc_feature 1..21: note = Synthetic
  source 1..21: mol_type = other RNA
tgttgggtccctcgcagagtg

SEQ ID NO: 9646 - RNA, 21 nt, synthetic construct
  misc_feature 1..21: note = Synthetic
  source 1..21: mol_type = other RNA
tgttgtccaagcattcgttgg

SEQ ID NO: 9647 - RNA, 21 nt, synthetic construct
  misc_feature 1..21: note = Synthetic
  source 1..21: mol_type = other RNA
tgttgtgtgttgaaagccact

SEQ ID NO: 9648 - RNA, 21 nt, synthetic construct
  misc_feature 1..21: note = Synthetic
  source 1..21: mol_type = other RNA
tgtttctcttatccttcacga

SEQ ID NO: 9649 - RNA, 21 nt, synthetic construct
  misc_feature 1..21: note = Synthetic
  source 1..21: mol_type = other RNA
tgtttgaggattgtgtcacgg

SEQ ID NO: 9650 - RNA, 21 nt, synthetic construct
  misc_feature 1..21: note = Synthetic
  source 1..21: mol_type = other RNA
tgttttaaacacatacccatc

SEQ ID NO: 9651 - RNA, 21 nt, synthetic construct
  misc_feature 1..21: note = Synthetic
  source 1..21: mol_type = other RNA
tgttttcagtcaccagcgagt

SEQ ID NO: 9652 - RNA, 21 nt, synthetic construct
  misc_feature 1..21: note = Synthetic
  source 1..21: mol_type = other RNA
tgttttgtccctggggacaat

SEQ ID NO: 9653 - RNA, 21 nt, synthetic construct
  misc_feature 1..21: note = Synthetic
  source 1..21: mol_type = other RNA
tgttttttttttttgagacgg

SEQ ID NO: 9654 - RNA, 21 nt, synthetic construct
  misc_feature 1..21: note = Synthetic
  source 1..21: mol_type = other RNA
ttaaaaagtgacacccatctc

SEQ ID NO: 9655 - RNA, 21 nt, synthetic construct
  misc_feature 1..21: note = Synthetic
  source 1..21: mol_type = other RNA
ttaaacacatacccatcaacg

SEQ ID NO: 9656 - RNA, 21 nt, synthetic construct
  misc_feature 1..21: note = Synthetic
  source 1..21: mol_type = other RNA
ttaacgcagccaacttcatcg

SEQ ID NO: 9657 - RNA, 21 nt, synthetic construct
  misc_feature 1..21: note = Synthetic
  source 1..21: mol_type = other RNA
ttaactttttggtttttgtag

SEQ ID NO: 9658 - RNA, 21 nt, synthetic construct
  misc_feature 1..21: note = Synthetic
  source 1..21: mol_type = other RNA
ttaagaaatttaattgatcac

SEQ ID NO: 9659 - RNA, 21 nt, synthetic construct
  misc_feature 1..21: note = Synthetic
  source 1..21: mol_type = other RNA
ttaagagatggggtcttacta

SEQ ID NO: 9660 - RNA, 21 nt, synthetic construct
  misc_feature 1..21: note = Synthetic
  source 1..21: mol_type = other RNA
ttaagccgccagttcttccat

SEQ ID NO: 9661 - RNA, 21 nt, synthetic construct
  misc_feature 1..21: note = Synthetic
  source 1..21: mol_type = other RNA
ttaaggaaggtacaaacccac

SEQ ID NO: 9662 - RNA, 21 nt, synthetic construct
  misc_feature 1..21: note = Synthetic
  source 1..21: mol_type = other RNA
ttaagggtgaccagtgactca

SEQ ID NO: 9663 - RNA, 21 nt, synthetic construct
  misc_feature 1..21: note = Synthetic
  source 1..21: mol_type = other RNA
ttaaggtcattgcagacgtgg

SEQ ID NO: 9664 - RNA, 21 nt, synthetic construct
  misc_feature 1..21: note = Synthetic
  source 1..21: mol_type = other RNA
ttaataaatattaagggtgac

SEQ ID NO: 9665 - RNA, 21 nt, synthetic construct
  misc_feature 1..21: note = Synthetic
  source 1..21: mol_type = other RNA
ttaattgatcacagtaagaca

SEQ ID NO: 9666 - RNA, 21 nt, synthetic construct
  misc_feature 1..21: note = Synthetic
  source 1..21: mol_type = other RNA
ttacaggcgtgagccactgcg

SEQ ID NO: 9667 - RNA, 21 nt, synthetic construct
  misc_feature 1..21: note = Synthetic
  source 1..21: mol_type = other RNA
ttacaggcgtgaggcacctgt

SEQ ID NO: 9668 - RNA, 21 nt, synthetic construct
  misc_feature 1..21: note = Synthetic
  source 1..21: mol_type = other RNA
ttacggctgtggagctgacct

SEQ ID NO: 9669 - RNA, 21 nt, synthetic construct
  misc_feature 1..21: note = Synthetic
  source 1..21: mol_type = other RNA
ttacgtgctccgaaaccagaa

SEQ ID NO: 9670 - RNA, 21 nt, synthetic construct
  misc_feature 1..21: note = Synthetic
  source 1..21: mol_type = other RNA
ttactatgttgcccaggctgg

SEQ ID NO: 9671 - RNA, 21 nt, synthetic construct
  misc_feature 1..21: note = Synthetic
  source 1..21: mol_type = other RNA
ttagagattggtggatgaggc

SEQ ID NO: 9672 - RNA, 21 nt, synthetic construct
  misc_feature 1..21: note = Synthetic
  source 1..21: mol_type = other RNA
ttagccaggatggtctcgatc

SEQ ID NO: 9673 - RNA, 21 nt, synthetic construct
  misc_feature 1..21: note = Synthetic
  source 1..21: mol_type = other RNA
ttagcctgacggtggatgtct

SEQ ID NO: 9674 - RNA, 21 nt, synthetic construct
  misc_feature 1..21: note = Synthetic
  source 1..21: mol_type = other RNA
ttaggcagtggaactcgaagg

SEQ ID NO: 9675 - RNA, 21 nt, synthetic construct
  misc_feature 1..21: note = Synthetic
  source 1..21: mol_type = other RNA
ttaggggtttggcttagagat

SEQ ID NO: 9676 - RNA, 21 nt, synthetic construct
  misc_feature 1..21: note = Synthetic
  source 1..21: mol_type = other RNA
ttagtagagacggggtttcac

SEQ ID NO: 9677 - RNA, 21 nt, synthetic construct
  misc_feature 1..21: note = Synthetic
  source 1..21: mol_type = other RNA
ttatagttgtatttctgaaat

SEQ ID NO: 9678 - RNA, 21 nt, synthetic construct
  misc_feature 1..21: note = Synthetic
  source 1..21: mol_type = other RNA
ttatatatatgtgtgtatata

SEQ ID NO: 9679 - RNA, 21 nt, synthetic construct
  misc_feature 1..21: note = Synthetic
  source 1..21: mol_type = other RNA
ttatcacggttccctgcactg

SEQ ID NO: 9680 - RNA, 21 nt, synthetic construct
  misc_feature 1..21: note = Synthetic
  source 1..21: mol_type = other RNA
ttatccttcacgaggaaagga

SEQ ID NO: 9681 - RNA, 21 nt, synthetic construct
  misc_feature 1..21: note = Synthetic
  source 1..21: mol_type = other RNA
ttatttatttttttatagttg

SEQ ID NO: 9682 - RNA, 21 nt, synthetic construct
  misc_feature 1..21: note = Synthetic
  source 1..21: mol_type = other RNA
ttatttttttatagttgtatt

SEQ ID NO: 9683 - RNA, 21 nt, synthetic construct
  misc_feature 1..21: note = Synthetic
  source 1..21: mol_type = other RNA
ttcaaccaatatacaaagtgc

SEQ ID NO: 9684 - RNA, 21 nt, synthetic construct
  misc_feature 1..21: note = Synthetic
  source 1..21: mol_type = other RNA
ttcaacctcgtaaggaaccga

SEQ ID NO: 9685 - RNA, 21 nt, synthetic construct
  misc_feature 1..21: note = Synthetic
  source 1..21: mol_type = other RNA
ttcacaccattctcctgcctc

SEQ ID NO: 9686 - RNA, 21 nt, synthetic construct
  misc_feature 1..21: note = Synthetic
  source 1..21: mol_type = other RNA
ttcacgaggaaaggaagaaac

SEQ ID NO: 9687 - RNA, 21 nt, synthetic construct
  misc_feature 1..21: note = Synthetic
  source 1..21: mol_type = other RNA
ttcacgatcacggctttgaag

SEQ ID NO: 9688 - RNA, 21 nt, synthetic construct
  misc_feature 1..21: note = Synthetic
  source 1..21: mol_type = other RNA
ttcacgcagagctggctgcag

SEQ ID NO: 9689 - RNA, 21 nt, synthetic construct
  misc_feature 1..21: note = Synthetic
  source 1..21: mol_type = other RNA
ttcacgccacgtcatcctcca

SEQ ID NO: 9690 - RNA, 21 nt, synthetic construct
  misc_feature 1..21: note = Synthetic
  source 1..21: mol_type = other RNA
ttcacgcccttggtatccgca

SEQ ID NO: 9691 - RNA, 21 nt, synthetic construct
  misc_feature 1..21: note = Synthetic
  source 1..21: mol_type = other RNA
ttcacgcgggagtctgacgga

SEQ ID NO: 9692 - RNA, 21 nt, synthetic construct
  misc_feature 1..21: note = Synthetic
  source 1..21: mol_type = other RNA
ttcacgtgttagccaggatgg

SEQ ID NO: 9693 - RNA, 21 nt, synthetic construct
  misc_feature 1..21: note = Synthetic
  source 1..21: mol_type = other RNA
ttcactcctcttggctgggtg

SEQ ID NO: 9694 - RNA, 21 nt, synthetic construct
  misc_feature 1..21: note = Synthetic
  source 1..21: mol_type = other RNA
ttcagaaagaacctgaagtcc

SEQ ID NO: 9695 - RNA, 21 nt, synthetic construct
  misc_feature 1..21: note = Synthetic
  source 1..21: mol_type = other RNA
ttcagaggcaataacccccta

SEQ ID NO: 9696 - RNA, 21 nt, synthetic construct
  misc_feature 1..21: note = Synthetic
  source 1..21: mol_type = other RNA
ttcagccaacaagttgacatc

SEQ ID NO: 9697 - RNA, 21 nt, synthetic construct
  misc_feature 1..21: note = Synthetic
  source 1..21: mol_type = other RNA
ttcagccagatcatttccgac

SEQ ID NO: 9698 - RNA, 21 nt, synthetic construct
  misc_feature 1..21: note = Synthetic
  source 1..21: mol_type = other RNA
ttcaggccccctttcttgatc

SEQ ID NO: 9699 - RNA, 21 nt, synthetic construct
  misc_feature 1..21: note = Synthetic
  source 1..21: mol_type = other RNA
ttcaggctacaaaaaccttct

SEQ ID NO: 9700 - RNA, 21 nt, synthetic construct
  misc_feature 1..21: note = Synthetic
  source 1..21: mol_type = other RNA
ttcagtcaccagcgagtagat

SEQ ID NO: 9701 - RNA, 21 nt, synthetic construct
  misc_feature 1..21: note = Synthetic
  source 1..21: mol_type = other RNA
ttcatcctccaagatggtctt

SEQ ID NO: 9702 - RNA, 21 nt, synthetic construct
  misc_feature 1..21: note = Synthetic
  source 1..21: mol_type = other RNA
ttcatcgctcatgtccttgca

SEQ ID NO: 9703 - RNA, 21 nt, synthetic construct
  misc_feature 1..21: note = Synthetic
  source 1..21: mol_type = other RNA
ttcatctgaccagtcccggca

SEQ ID NO: 9704 - RNA, 21 nt, synthetic construct
  misc_feature 1..21: note = Synthetic
  source 1..21: mol_type = other RNA
ttcatctgttgcccaggctgg

SEQ ID NO: 9705 - RNA, 21 nt, synthetic construct
  misc_feature 1..21: note = Synthetic
  source 1..21: mol_type = other RNA
ttcatcttccatgtttgagga

SEQ ID NO: 9706 - RNA, 21 nt, synthetic construct
  misc_feature 1..21: note = Synthetic
  source 1..21: mol_type = other RNA
ttcattgacacgggctttccc

SEQ ID NO: 9707 - RNA, 21 nt, synthetic construct
  misc_feature 1..21: note = Synthetic
  source 1..21: mol_type = other RNA
ttcatttaagaaatttaattg

SEQ ID NO: 9708 - RNA, 21 nt, synthetic construct
  misc_feature 1..21: note = Synthetic
  source 1..21: mol_type = other RNA
ttcattttttaagagatgggg

SEQ ID NO: 9709 - RNA, 21 nt, synthetic construct
  misc_feature 1..21: note = Synthetic
  source 1..21: mol_type = other RNA
ttccagccccagggccccatg

SEQ ID NO: 9710 - RNA, 21 nt, synthetic construct
  misc_feature 1..21: note = Synthetic
  source 1..21: mol_type = other RNA
ttccatagaaggaagaccccc

SEQ ID NO: 9711 - RNA, 21 nt, synthetic construct
  misc_feature 1..21: note = Synthetic
  source 1..21: mol_type = other RNA
ttccatcagagcactggaatt

SEQ ID NO: 9712 - RNA, 21 nt, synthetic construct
  misc_feature 1..21: note = Synthetic
  source 1..21: mol_type = other RNA
ttccatgtttgaggattgtgt

SEQ ID NO: 9713 - RNA, 21 nt, synthetic construct
  misc_feature 1..21: note = Synthetic
  source 1..21: mol_type = other RNA
ttcccatcgtggcagcgaaac

SEQ ID NO: 9714 - RNA, 21 nt, synthetic construct
  misc_feature 1..21: note = Synthetic
  source 1..21: mol_type = other RNA
ttccccagtcagtccagtaca

SEQ ID NO: 9715 - RNA, 21 nt, synthetic construct
  misc_feature 1..21: note = Synthetic
  source 1..21: mol_type = other RNA
ttcccgggttcacaccattct

SEQ ID NO: 9716 - RNA, 21 nt, synthetic construct
  misc_feature 1..21: note = Synthetic
  source 1..21: mol_type = other RNA
ttcccggtcacactgccggct

SEQ ID NO: 9717 - RNA, 21 nt, synthetic construct
  misc_feature 1..21: note = Synthetic
  source 1..21: mol_type = other RNA
ttcccgtcttggcactggaac

SEQ ID NO: 9718 - RNA, 21 nt, synthetic construct
  misc_feature 1..21: note = Synthetic
  source 1..21: mol_type = other RNA
ttccctgcactgggggggaca

SEQ ID NO: 9719 - RNA, 21 nt, synthetic construct
  misc_feature 1..21: note = Synthetic
  source 1..21: mol_type = other RNA
ttccctggcctgggatcccat

SEQ ID NO: 9720 - RNA, 21 nt, synthetic construct
  misc_feature 1..21: note = Synthetic
  source 1..21: mol_type = other RNA
ttccgacgccatgaatccctt

SEQ ID NO: 9721 - RNA, 21 nt, synthetic construct
  misc_feature 1..21: note = Synthetic
  source 1..21: mol_type = other RNA
ttccggttgcccccgttgaca

SEQ ID NO: 9722 - RNA, 21 nt, synthetic construct
  misc_feature 1..21: note = Synthetic
  source 1..21: mol_type = other RNA
ttcctcacactggcacttgta

SEQ ID NO: 9723 - RNA, 21 nt, synthetic construct
  misc_feature 1..21: note = Synthetic
  source 1..21: mol_type = other RNA
ttcctcaggttggggatgagg

SEQ ID NO: 9724 - RNA, 21 nt, synthetic construct
  misc_feature 1..21: note = Synthetic
  source 1..21: mol_type = other RNA
ttcctcgtcagatttgtcctt

SEQ ID NO: 9725 - RNA, 21 nt, synthetic construct
  misc_feature 1..21: note = Synthetic
  source 1..21: mol_type = other RNA
ttcctctgccagcaacgtcgc

SEQ ID NO: 9726 - RNA, 21 nt, synthetic construct
  misc_feature 1..21: note = Synthetic
  source 1..21: mol_type = other RNA
ttcctcttcacgcccttggta

SEQ ID NO: 9727 - RNA, 21 nt, synthetic construct
  misc_feature 1..21: note = Synthetic
  source 1..21: mol_type = other RNA
ttcctgacctcgtgccggttg

SEQ ID NO: 9728 - RNA, 21 nt, synthetic construct
  misc_feature 1..21: note = Synthetic
  source 1..21: mol_type = other RNA
ttcctggagagaaatggaggt

SEQ ID NO: 9729 - RNA, 21 nt, synthetic construct
  misc_feature 1..21: note = Synthetic
  source 1..21: mol_type = other RNA
ttcctggcttaaggaaggtac

SEQ ID NO: 9730 - RNA, 21 nt, synthetic construct
  misc_feature 1..21: note = Synthetic
  source 1..21: mol_type = other RNA
ttcgcagtcggggtcgttgtc

SEQ ID NO: 9731 - RNA, 21 nt, synthetic construct
  misc_feature 1..21: note = Synthetic
  source 1..21: mol_type = other RNA
ttcgcatctgtcgcccacgtg

SEQ ID NO: 9732 - RNA, 21 nt, synthetic construct
  misc_feature 1..21: note = Synthetic
  source 1..21: mol_type = other RNA
ttcgcatctgtcgcccactgc

SEQ ID NO: 9733 - RNA, 21 nt, synthetic construct
  misc_feature 1..21: note = Synthetic
  source 1..21: mol_type = other RNA
ttcgcatcttcgctgggccac

SEQ ID NO: 9734 - RNA, 21 nt, synthetic construct
  misc_feature 1..21: note = Synthetic
  source 1..21: mol_type = other RNA
ttcgccaggagggcccaggat

SEQ ID NO: 9735 - RNA, 21 nt, synthetic construct
  misc_feature 1..21: note = Synthetic
  source 1..21: mol_type = other RNA
ttcgccgctgtgacacttgaa

SEQ ID NO: 9736 - RNA, 21 nt, synthetic construct
  misc_feature 1..21: note = Synthetic
  source 1..21: mol_type = other RNA
ttcgctgggccaccagctgga

SEQ ID NO: 9737 - RNA, 21 nt, synthetic construct
  misc_feature 1..21: note = Synthetic
  source 1..21: mol_type = other RNA
ttcgggggtgacagggcaaag

SEQ ID NO: 9738 - RNA, 21 nt, synthetic construct
  misc_feature 1..21: note = Synthetic
  source 1..21: mol_type = other RNA
ttcgtcagggcgacaggtggc

SEQ ID NO: 9739 - RNA, 21 nt, synthetic construct
  misc_feature 1..21: note = Synthetic
  source 1..21: mol_type = other RNA
ttcgtgcaaataatctttgta

SEQ ID NO: 9740 - RNA, 21 nt, synthetic construct
  misc_feature 1..21: note = Synthetic
  source 1..21: mol_type = other RNA
ttcgtgtgggggtccagctgg

SEQ ID NO: 9741 - RNA, 21 nt, synthetic construct
  misc_feature 1..21: note = Synthetic
  source 1..21: mol_type = other RNA
ttcgttgatgatatctgtcca

SEQ ID NO: 9742 - RNA, 21 nt, synthetic construct
  misc_feature 1..21: note = Synthetic
  source 1..21: mol_type = other RNA
ttcgttggtcccgcactcttt

SEQ ID NO: 9743 - RNA, 21 nt, synthetic construct
  misc_feature 1..21: note = Synthetic
  source 1..21: mol_type = other RNA
ttctatacagtggtttaaaaa

SEQ ID NO: 9744 - RNA, 21 nt, synthetic construct
  misc_feature 1..21: note = Synthetic
  source 1..21: mol_type = other RNA
ttctattgctggccacctccg

SEQ ID NO: 9745 - RNA, 21 nt, synthetic construct
  misc_feature 1..21: note = Synthetic
  source 1..21: mol_type = other RNA
ttctcatttcctctgccagca

SEQ ID NO: 9746 - RNA, 21 nt, synthetic construct
  misc_feature 1..21: note = Synthetic
  source 1..21: mol_type = other RNA
ttctcccaaaaagcgttgcac

SEQ ID NO: 9747 - RNA, 21 nt, synthetic construct
  misc_feature 1..21: note = Synthetic
  source 1..21: mol_type = other RNA
ttctccctgaataacgttttc

SEQ ID NO: 9748 - RNA, 21 nt, synthetic construct
  misc_feature 1..21: note = Synthetic
  source 1..21: mol_type = other RNA
ttctcctgcctcagcctcccg

SEQ ID NO: 9749 - RNA, 21 nt, synthetic construct
  misc_feature 1..21: note = Synthetic
  source 1..21: mol_type = other RNA
ttctcgatattcacgatcacg

SEQ ID NO: 9750 - RNA, 21 nt, synthetic construct
  misc_feature 1..21: note = Synthetic
  source 1..21: mol_type = other RNA
ttctctgggacaggtcagacc

SEQ ID NO: 9751 - RNA, 21 nt, synthetic construct
  misc_feature 1..21: note = Synthetic
  source 1..21: mol_type = other RNA
ttctctgggcctgacatcccc

SEQ ID NO: 9752 - RNA, 21 nt, synthetic construct
  misc_feature 1..21: note = Synthetic
  source 1..21: mol_type = other RNA
ttctctgtctttgaataaaac

SEQ ID NO: 9753 - RNA, 21 nt, synthetic construct
  misc_feature 1..21: note = Synthetic
  source 1..21: mol_type = other RNA
ttctcttatccttcacgagga

SEQ ID NO: 9754 - RNA, 21 nt, synthetic construct
  misc_feature 1..21: note = Synthetic
  source 1..21: mol_type = other RNA
ttctgaaatagggtcttcatc

SEQ ID NO: 9755 - RNA, 21 nt, synthetic construct
  misc_feature 1..21: note = Synthetic
  source 1..21: mol_type = other RNA
ttctgaggcaacgtttcaacc

SEQ ID NO: 9756 - RNA, 21 nt, synthetic construct
  misc_feature 1..21: note = Synthetic
  source 1..21: mol_type = other RNA
ttctgatagacggggttgtca

SEQ ID NO: 9757 - RNA, 21 nt, synthetic construct
  misc_feature 1..21: note = Synthetic
  source 1..21: mol_type = other RNA
ttctgcctcccagatgaataa

SEQ ID NO: 9758 - RNA, 21 nt, synthetic construct
  misc_feature 1..21: note = Synthetic
  source 1..21: mol_type = other RNA
ttctgggcagggacgggactc

SEQ ID NO: 9759 - RNA, 21 nt, synthetic construct
  misc_feature 1..21: note = Synthetic
  source 1..21: mol_type = other RNA
ttcttaagccgccagttcttc

SEQ ID NO: 9760 - RNA, 21 nt, synthetic construct
  misc_feature 1..21: note = Synthetic
  source 1..21: mol_type = other RNA
ttcttccatagaaggaagacc

SEQ ID NO: 9761 - RNA, 21 nt, synthetic construct
  misc_feature 1..21: note = Synthetic
  source 1..21: mol_type = other RNA
ttcttctcatttcctctgcca

SEQ ID NO: 9762 - RNA, 21 nt, synthetic construct
  misc_feature 1..21: note = Synthetic
  source 1..21: mol_type = other RNA
ttcttgatcttggcgggagtt

SEQ ID NO: 9763 - RNA, 21 nt, synthetic construct
  misc_feature 1..21: note = Synthetic
  source 1..21: mol_type = other RNA
ttctttcgcatctgtcgccca

SEQ ID NO: 9764 - RNA, 21 nt, synthetic construct
  misc_feature 1..21: note = Synthetic
  source 1..21: mol_type = other RNA
ttgaaagccacttgcttctct

SEQ ID NO: 9765 - RNA, 21 nt, synthetic construct
  misc_feature 1..21: note = Synthetic
  source 1..21: mol_type = other RNA
ttgaacttgttgggtccctcg

SEQ ID NO: 9766 - RNA, 21 nt, synthetic construct
  misc_feature 1..21: note = Synthetic
  source 1..21: mol_type = other RNA
ttgaagtcccggtcaacctgc

SEQ ID NO: 9767 - RNA, 21 nt, synthetic construct
  misc_feature 1..21: note = Synthetic
  source 1..21: mol_type = other RNA
ttgaataaaacaaggccggcg

SEQ ID NO: 9768 - RNA, 21 nt, synthetic construct
  misc_feature 1..21: note = Synthetic
  source 1..21: mol_type = other RNA
ttgacacggcccccacagctg

SEQ ID NO: 9769 - RNA, 21 nt, synthetic construct
  misc_feature 1..21: note = Synthetic
  source 1..21: mol_type = other RNA
ttgacacgggctttccctggc

SEQ ID NO: 9770 - RNA, 21 nt, synthetic construct
  misc_feature 1..21: note = Synthetic
  source 1..21: mol_type = other RNA
ttgacatcgatgcttgagatg

SEQ ID NO: 9771 - RNA, 21 nt, synthetic construct
  misc_feature 1..21: note = Synthetic
  source 1..21: mol_type = other RNA
ttgacatcggaacctgtgagg

SEQ ID NO: 9772 - RNA, 21 nt, synthetic construct
  misc_feature 1..21: note = Synthetic
  source 1..21: mol_type = other RNA
ttgactcctgagtttaggggt

SEQ ID NO: 9773 - RNA, 21 nt, synthetic construct
  misc_feature 1..21: note = Synthetic
  source 1..21: mol_type = other RNA
ttgagacggagtctcgctctg

SEQ ID NO: 9774 - RNA, 21 nt, synthetic construct
  misc_feature 1..21: note = Synthetic
  source 1..21: mol_type = other RNA
ttgagatggagtgaagtttgg

SEQ ID NO: 9775 - RNA, 21 nt, synthetic construct
  misc_feature 1..21: note = Synthetic
  source 1..21: mol_type = other RNA
ttgaggattgtgtcacggtgg

SEQ ID NO: 9776 - RNA, 21 nt, synthetic construct
  misc_feature 1..21: note = Synthetic
  source 1..21: mol_type = other RNA
ttgagggtggccgggggcccc

SEQ ID NO: 9777 - RNA, 21 nt, synthetic construct
  misc_feature 1..21: note = Synthetic
  source 1..21: mol_type = other RNA
ttgatcacagtaagacattca

SEQ ID NO: 9778 - RNA, 21 nt, synthetic construct
  misc_feature 1..21: note = Synthetic
  source 1..21: mol_type = other RNA
ttgatcggggctggtggggcg

SEQ ID NO: 9779 - RNA, 21 nt, synthetic construct
  misc_feature 1..21: note = Synthetic
  source 1..21: mol_type = other RNA
ttgatctgcggggcagggagg

SEQ ID NO: 9780 - RNA, 21 nt, synthetic construct
  misc_feature 1..21: note = Synthetic
  source 1..21: mol_type = other RNA
ttgatcttggcgggagttccc

SEQ ID NO: 9781 - RNA, 21 nt, synthetic construct
  misc_feature 1..21: note = Synthetic
  source 1..21: mol_type = other RNA
ttgatgatatctgtccaaaat

SEQ ID NO: 9782 - RNA, 21 nt, synthetic construct
  misc_feature 1..21: note = Synthetic
  source 1..21: mol_type = other RNA
ttgatgctgttgatgttctta

SEQ ID NO: 9783 - RNA, 21 nt, synthetic construct
  misc_feature 1..21: note = Synthetic
  source 1..21: mol_type = other RNA
ttgatgggttcatctgaccag

SEQ ID NO: 9784 - RNA, 21 nt, synthetic construct
  misc_feature 1..21: note = Synthetic
  source 1..21: mol_type = other RNA
ttgatgttcttaagccgccag

SEQ ID NO: 9785 - RNA, 21 nt, synthetic construct
  misc_feature 1..21: note = Synthetic
  source 1..21: mol_type = other RNA
ttgcaaaaataaatagatttt

SEQ ID NO: 9786 - RNA, 21 nt, synthetic construct
  misc_feature 1..21: note = Synthetic
  source 1..21: mol_type = other RNA
ttgcacacagtccagttcgtg

SEQ ID NO: 9787 - RNA, 21 nt, synthetic construct
  misc_feature 1..21: note = Synthetic
  source 1..21: mol_type = other RNA
ttgcactggaagctggcggga

SEQ ID NO: 9788 - RNA, 21 nt, synthetic construct
  misc_feature 1..21: note = Synthetic
  source 1..21: mol_type = other RNA
ttgcagacgtgggaacagccg

SEQ ID NO: 9789 - RNA, 21 nt, synthetic construct
  misc_feature 1..21: note = Synthetic
  source 1..21: mol_type = other RNA
ttgcagactttgtccagggtg

SEQ ID NO: 9790 - RNA, 21 nt, synthetic construct
  misc_feature 1..21: note = Synthetic
  source 1..21: mol_type = other RNA
ttgcaggccttcgtgtggggg

SEQ ID NO: 9791 - RNA, 21 nt, synthetic construct
  misc_feature 1..21: note = Synthetic
  source 1..21: mol_type = other RNA
ttgcaggtgacagacaagcac

SEQ ID NO: 9792 - RNA, 21 nt, synthetic construct
  misc_feature 1..21: note = Synthetic
  source 1..21: mol_type = other RNA
ttgcagtcatattcccggtca

SEQ ID NO: 9793 - RNA, 21 nt, synthetic construct
  misc_feature 1..21: note = Synthetic
  source 1..21: mol_type = other RNA
ttgcagtcggggccaccatca

SEQ ID NO: 9794 - RNA, 21 nt, synthetic construct
  misc_feature 1..21: note = Synthetic
  source 1..21: mol_type = other RNA
ttgcatagaagaggtaaacac

SEQ ID NO: 9795 - RNA, 21 nt, synthetic construct
  misc_feature 1..21: note = Synthetic
  source 1..21: mol_type = other RNA
ttgcatagaagtggaagcact

SEQ ID NO: 9796 - RNA, 21 nt, synthetic construct
  misc_feature 1..21: note = Synthetic
  source 1..21: mol_type = other RNA
ttgcatgggcactgtccgaag

SEQ ID NO: 9797 - RNA, 21 nt, synthetic construct
  misc_feature 1..21: note = Synthetic
  source 1..21: mol_type = other RNA
ttgccaatcccttgtgacatc

SEQ ID NO: 9798 - RNA, 21 nt, synthetic construct
  misc_feature 1..21: note = Synthetic
  source 1..21: mol_type = other RNA
ttgcccaggctggaaagcagt

SEQ ID NO: 9799 - RNA, 21 nt, synthetic construct
  misc_feature 1..21: note = Synthetic
  source 1..21: mol_type = other RNA
ttgcccaggctggagtgcagt

SEQ ID NO: 9800 - RNA, 21 nt, synthetic construct
  misc_feature 1..21: note = Synthetic
  source 1..21: mol_type = other RNA
ttgcccccgttgacatcgatg

SEQ ID NO: 9801 - RNA, 21 nt, synthetic construct
  misc_feature 1..21: note = Synthetic
  source 1..21: mol_type = other RNA
ttgctcaggcctggtctccaa

SEQ ID NO: 9802 - RNA, 21 nt, synthetic construct
  misc_feature 1..21: note = Synthetic
  source 1..21: mol_type = other RNA
ttgctcagggtggtcctctca

SEQ ID NO: 9803 - RNA, 21 nt, synthetic construct
  misc_feature 1..21: note = Synthetic
  source 1..21: mol_type = other RNA
ttgctcgtctgagccgttgtc

SEQ ID NO: 9804 - RNA, 21 nt, synthetic construct
  misc_feature 1..21: note = Synthetic
  source 1..21: mol_type = other RNA
ttgctggccacctccgtgtcc

SEQ ID NO: 9805 - RNA, 21 nt, synthetic construct
  misc_feature 1..21: note = Synthetic
  source 1..21: mol_type = other RNA
ttgctgtggatccagtccaca

SEQ ID NO: 9806 - RNA, 21 nt, synthetic construct
  misc_feature 1..21: note = Synthetic
  source 1..21: mol_type = other RNA
ttgcttctctgggcctgacat

SEQ ID NO: 9807 - RNA, 21 nt, synthetic construct
  misc_feature 1..21: note = Synthetic
  source 1..21: mol_type = other RNA
ttggaacacgtaaagacccct

SEQ ID NO: 9808 - RNA, 21 nt, synthetic construct
  misc_feature 1..21: note = Synthetic
  source 1..21: mol_type = other RNA
ttggagccgttctccctgaat

SEQ ID NO: 9809 - RNA, 21 nt, synthetic construct
  misc_feature 1..21: note = Synthetic
  source 1..21: mol_type = other RNA
ttggaggcatttgcatagaag

SEQ ID NO: 9810 - RNA, 21 nt, synthetic construct
  misc_feature 1..21: note = Synthetic
  source 1..21: mol_type = other RNA
ttggagtcaacccagtagagg

SEQ ID NO: 9811 - RNA, 21 nt, synthetic construct
  misc_feature 1..21: note = Synthetic
  source 1..21: mol_type = other RNA
ttggcactgaaaatggcttcg

SEQ ID NO: 9812 - RNA, 21 nt, synthetic construct
  misc_feature 1..21: note = Synthetic
  source 1..21: mol_type = other RNA
ttggcactggaactcgtttct

SEQ ID NO: 9813 - RNA, 21 nt, synthetic construct
  misc_feature 1..21: note = Synthetic
  source 1..21: mol_type = other RNA
ttggccatcgcacctccagaa

SEQ ID NO: 9814 - RNA, 21 nt, synthetic construct
  misc_feature 1..21: note = Synthetic
  source 1..21: mol_type = other RNA
ttggcgggagttccccagtca

SEQ ID NO: 9815 - RNA, 21 nt, synthetic construct
  misc_feature 1..21: note = Synthetic
  source 1..21: mol_type = other RNA
ttggctgggtgaggttgtgga

SEQ ID NO: 9816 - RNA, 21 nt, synthetic construct
  misc_feature 1..21: note = Synthetic
  source 1..21: mol_type = other RNA
ttggcttagagattggtggat

SEQ ID NO: 9817 - RNA, 21 nt, synthetic construct
  misc_feature 1..21: note = Synthetic
  source 1..21: mol_type = other RNA
ttggcttggagccgttctccc

SEQ ID NO: 9818 - RNA, 21 nt, synthetic construct
  misc_feature 1..21: note = Synthetic
  source 1..21: mol_type = other RNA
ttgggccactgaatgttttca

SEQ ID NO: 9819 - RNA, 21 nt, synthetic construct
  misc_feature 1..21: note = Synthetic
  source 1..21: mol_type = other RNA
ttgggcgagtgggggttgatc

SEQ ID NO: 9820 - RNA, 21 nt, synthetic construct
  misc_feature 1..21: note = Synthetic
  source 1..21: mol_type = other RNA
ttggggaagtgaatggcttgg

SEQ ID NO: 9821 - RNA, 21 nt, synthetic construct
  misc_feature 1..21: note = Synthetic
  source 1..21: mol_type = other RNA
ttggggatgaggctggtgtac

SEQ ID NO: 9822 - RNA, 21 nt, synthetic construct
  misc_feature 1..21: note = Synthetic
  source 1..21: mol_type = other RNA
ttgggggagcacgtctcctgg

SEQ ID NO: 9823 - RNA, 21 nt, synthetic construct
  misc_feature 1..21: note = Synthetic
  source 1..21: mol_type = other RNA
ttggggggacagccttgctcg

SEQ ID NO: 9824 - RNA, 21 nt, synthetic construct
  misc_feature 1..21: note = Synthetic
  source 1..21: mol_type = other RNA
ttgggtccctcgcagagtgtc

SEQ ID NO: 9825 - RNA, 21 nt, synthetic construct
  misc_feature 1..21: note = Synthetic
  source 1..21: mol_type = other RNA
ttggtatccgcaacagagaca

SEQ ID NO: 9826 - RNA, 21 nt, synthetic construct
  misc_feature 1..21: note = Synthetic
  source 1..21: mol_type = other RNA
ttggtcccgcactctttgatg

SEQ ID NO: 9827 - RNA, 21 nt, synthetic construct
  misc_feature 1..21: note = Synthetic
  source 1..21: mol_type = other RNA
ttggtctcggtgccaccacgg

SEQ ID NO: 9828 - RNA, 21 nt, synthetic construct
  misc_feature 1..21: note = Synthetic
  source 1..21: mol_type = other RNA
ttggtcttctctgtctttgaa

SEQ ID NO: 9829 - RNA, 21 nt, synthetic construct
  misc_feature 1..21: note = Synthetic
  source 1..21: mol_type = other RNA
ttggtgaagaagaggtaggcg

SEQ ID NO: 9830 - RNA, 21 nt, synthetic construct
  misc_feature 1..21: note = Synthetic
  source 1..21: mol_type = other RNA
ttggtgaatgagtttggtctc

SEQ ID NO: 9831 - RNA, 21 nt, synthetic construct
  misc_feature 1..21: note = Synthetic
  source 1..21: mol_type = other RNA
ttggtgagacattgtcactat

SEQ ID NO: 9832 - RNA, 21 nt, synthetic construct
  misc_feature 1..21: note = Synthetic
  source 1..21: mol_type = other RNA
ttggtgccatctgctgttgtg

SEQ ID NO: 9833 - RNA, 21 nt, synthetic construct
  misc_feature 1..21: note = Synthetic
  source 1..21: mol_type = other RNA
ttggtggatgaggcagggcca

SEQ ID NO: 9834 - RNA, 21 nt, synthetic construct
  misc_feature 1..21: note = Synthetic
  source 1..21: mol_type = other RNA
ttggtttttgtagagatggga

SEQ ID NO: 9835 - RNA, 21 nt, synthetic construct
  misc_feature 1..21: note = Synthetic
  source 1..21: mol_type = other RNA
ttgtacataaagaagaggcat

SEQ ID NO: 9836 - RNA, 21 nt, synthetic construct
  misc_feature 1..21: note = Synthetic
  source 1..21: mol_type = other RNA
ttgtagagatgggatctcgct

SEQ ID NO: 9837 - RNA, 21 nt, synthetic construct
  misc_feature 1..21: note = Synthetic
  source 1..21: mol_type = other RNA
ttgtagccaccctccaggttc

SEQ ID NO: 9838 - RNA, 21 nt, synthetic construct
  misc_feature 1..21: note = Synthetic
  source 1..21: mol_type = other RNA
ttgtaggagatgcatttcccg

SEQ ID NO: 9839 - RNA, 21 nt, synthetic construct
  misc_feature 1..21: note = Synthetic
  source 1..21: mol_type = other RNA
ttgtatttctgaaatagggtc

SEQ ID NO: 9840 - RNA, 21 nt, synthetic construct
  misc_feature 1..21: note = Synthetic
  source 1..21: mol_type = other RNA
ttgtatttttagtagagacgg

SEQ ID NO: 9841 - RNA, 21 nt, synthetic construct
  misc_feature 1..21: note = Synthetic
  source 1..21: mol_type = other RNA
ttgtcaaagttgatgctgttg

SEQ ID NO: 9842 - RNA, 21 nt, synthetic construct
  misc_feature 1..21: note = Synthetic
  source 1..21: mol_type = other RNA
ttgtcactatctccaccgtgg

SEQ ID NO: 9843 - RNA, 21 nt, synthetic construct
  misc_feature 1..21: note = Synthetic
  source 1..21: mol_type = other RNA
ttgtccaagcattcgttggtc

SEQ ID NO: 9844 - RNA, 21 nt, synthetic construct
  misc_feature 1..21: note = Synthetic
  source 1..21: mol_type = other RNA
ttgtccagggtgatgcattcg

SEQ ID NO: 9845 - RNA, 21 nt, synthetic construct
  misc_feature 1..21: note = Synthetic
  source 1..21: mol_type = other RNA
ttgtccctggggacaattgcc

SEQ ID NO: 9846 - RNA, 21 nt, synthetic construct
  misc_feature 1..21: note = Synthetic
  source 1..21: mol_type = other RNA
ttgtcctcaaagacggccaag

SEQ ID NO: 9847 - RNA, 21 nt, synthetic construct
  misc_feature 1..21: note = Synthetic
  source 1..21: mol_type = other RNA
ttgtccttgcagtcggggcca

SEQ ID NO: 9848 - RNA, 21 nt, synthetic construct
  misc_feature 1..21: note = Synthetic
  source 1..21: mol_type = other RNA
ttgtcgcaggcccacagctgg

SEQ ID NO: 9849 - RNA, 21 nt, synthetic construct
  misc_feature 1..21: note = Synthetic
  source 1..21: mol_type = other RNA
ttgtcgcagtccacttggcca

SEQ ID NO: 9850 - RNA, 21 nt, synthetic construct
  misc_feature 1..21: note = Synthetic
  source 1..21: mol_type = other RNA
ttgtcgtcgcctttgtgacag

SEQ ID NO: 9851 - RNA, 21 nt, synthetic construct
  misc_feature 1..21: note = Synthetic
  source 1..21: mol_type = other RNA
ttgtgacaggaaccgcggagg

SEQ ID NO: 9852 - RNA, 21 nt, synthetic construct
  misc_feature 1..21: note = Synthetic
  source 1..21: mol_type = other RNA
ttgtgacatcttcacgcggga

SEQ ID NO: 9853 - RNA, 21 nt, synthetic construct
  misc_feature 1..21: note = Synthetic
  source 1..21: mol_type = other RNA
ttgtggaagagaaccatatcc

SEQ ID NO: 9854 - RNA, 21 nt, synthetic construct
  misc_feature 1..21: note = Synthetic
  source 1..21: mol_type = other RNA
ttgtggcaaatgtggacctca

SEQ ID NO: 9855 - RNA, 21 nt, synthetic construct
  misc_feature 1..21: note = Synthetic
  source 1..21: mol_type = other RNA
ttgtgtcacggtggagagaaa

SEQ ID NO: 9856 - RNA, 21 nt, synthetic construct
  misc_feature 1..21: note = Synthetic
  source 1..21: mol_type = other RNA
ttgtgtgctgtgtccttacgg

SEQ ID NO: 9857 - RNA, 21 nt, synthetic construct
  misc_feature 1..21: note = Synthetic
  source 1..21: mol_type = other RNA
ttgtgtgttgaaagccacttg

SEQ ID NO: 9858 - RNA, 21 nt, synthetic construct
  misc_feature 1..21: note = Synthetic
  source 1..21: mol_type = other RNA
ttgttgctcaggcctggtctc

SEQ ID NO: 9859 - RNA, 21 nt, synthetic construct
  misc_feature 1..21: note = Synthetic
  source 1..21: mol_type = other RNA
ttgttgggtccctcgcagagt

SEQ ID NO: 9860 - RNA, 21 nt, synthetic construct
  misc_feature 1..21: note = Synthetic
  source 1..21: mol_type = other RNA
ttgttgtccaagcattcgttg

SEQ ID NO: 9861 - RNA, 21 nt, synthetic construct
  misc_feature 1..21: note = Synthetic
  source 1..21: mol_type = other RNA
ttgttttttttttttgagacg

SEQ ID NO: 9862 - RNA, 21 nt, synthetic construct
  misc_feature 1..21: note = Synthetic
  source 1..21: mol_type = other RNA
tttaaaaagtgacacccatct

SEQ ID NO: 9863 - RNA, 21 nt, synthetic construct
  misc_feature 1..21: note = Synthetic
  source 1..21: mol_type = other RNA
tttaaacacatacccatcaac

SEQ ID NO: 9864 - RNA, 21 nt, synthetic construct
  misc_feature 1..21: note = Synthetic
  source 1..21: mol_type = other RNA
tttaactttttggtttttgta

SEQ ID NO: 9865 - RNA, 21 nt, synthetic construct
  misc_feature 1..21: note = Synthetic
  source 1..21: mol_type = other RNA
tttaagaaatttaattgatca

SEQ ID NO: 9866 - RNA, 21 nt, synthetic construct
  misc_feature 1..21: note = Synthetic
  source 1..21: mol_type = other RNA
tttaagagatggggtcttact

SEQ ID NO: 9867 - RNA, 21 nt, synthetic construct
  misc_feature 1..21: note = Synthetic
  source 1..21: mol_type = other RNA
tttaattgatcacagtaagac

SEQ ID NO: 9868 - RNA, 21 nt, synthetic construct
  misc_feature 1..21: note = Synthetic
  source 1..21: mol_type = other RNA
tttacgtgctccgaaaccaga

SEQ ID NO: 9869 - RNA, 21 nt, synthetic construct
  misc_feature 1..21: note = Synthetic
  source 1..21: mol_type = other RNA
tttagcctgacggtggatgtc

SEQ ID NO: 9870 - RNA, 21 nt, synthetic construct
  misc_feature 1..21: note = Synthetic
  source 1..21: mol_type = other RNA
tttaggggtttggcttagaga

SEQ ID NO: 9871 - RNA, 21 nt, synthetic construct
  misc_feature 1..21: note = Synthetic
  source 1..21: mol_type = other RNA
tttagtagagacggggtttca

SEQ ID NO: 9872 - RNA, 21 nt, synthetic construct
  misc_feature 1..21: note = Synthetic
  source 1..21: mol_type = other RNA
tttatagttgtatttctgaaa

SEQ ID NO: 9873 - RNA, 21 nt, synthetic construct
  misc_feature 1..21: note = Synthetic
  source 1..21: mol_type = other RNA
tttatatatatgtgtgtatat

SEQ ID NO: 9874 - RNA, 21 nt, synthetic construct
  misc_feature 1..21: note = Synthetic
  source 1..21: mol_type = other RNA
tttatttatttttttatagtt

SEQ ID NO: 9875 - RNA, 21 nt, synthetic construct
  misc_feature 1..21: note = Synthetic
  source 1..21: mol_type = other RNA
tttatttttttatagttgtat

SEQ ID NO: 9876 - RNA, 21 nt, synthetic construct
  misc_feature 1..21: note = Synthetic
  source 1..21: mol_type = other RNA
tttcaaccaatatacaaagtg

SEQ ID NO: 9877 - RNA, 21 nt, synthetic construct
  misc_feature 1..21: note = Synthetic
  source 1..21: mol_type = other RNA
tttcaacctcgtaaggaaccg

SEQ ID NO: 9878 - RNA, 21 nt, synthetic construct
  misc_feature 1..21: note = Synthetic
  source 1..21: mol_type = other RNA
tttcacgtgttagccaggatg

SEQ ID NO: 9879 - RNA, 21 nt, synthetic construct
  misc_feature 1..21: note = Synthetic
  source 1..21: mol_type = other RNA
tttcagaaagaacctgaagtc

SEQ ID NO: 9880 - RNA, 21 nt, synthetic construct
  misc_feature 1..21: note = Synthetic
  source 1..21: mol_type = other RNA
tttcagaggcaataaccccct

SEQ ID NO: 9881 - RNA, 21 nt, synthetic construct
  misc_feature 1..21: note = Synthetic
  source 1..21: mol_type = other RNA
tttcagccaacaagttgacat

SEQ ID NO: 9882 - RNA, 21 nt, synthetic construct
  misc_feature 1..21: note = Synthetic
  source 1..21: mol_type = other RNA
tttcagtcaccagcgagtaga

SEQ ID NO: 9883 - RNA, 21 nt, synthetic construct
  misc_feature 1..21: note = Synthetic
  source 1..21: mol_type = other RNA
tttcatcctccaagatggtct

SEQ ID NO: 9884 - RNA, 21 nt, synthetic construct
  misc_feature 1..21: note = Synthetic
  source 1..21: mol_type = other RNA
tttcatcttccatgtttgagg

SEQ ID NO: 9885 - RNA, 21 nt, synthetic construct
  misc_feature 1..21: note = Synthetic
  source 1..21: mol_type = other RNA
tttccagccccagggccccat

SEQ ID NO: 9886 - RNA, 21 nt, synthetic construct
  misc_feature 1..21: note = Synthetic
  source 1..21: mol_type = other RNA
tttccatcagagcactggaat

SEQ ID NO: 9887 - RNA, 21 nt, synthetic construct
  misc_feature 1..21: note = Synthetic
  source 1..21: mol_type = other RNA
tttcccgtcttggcactggaa

SEQ ID NO: 9888 - RNA, 21 nt, synthetic construct
  misc_feature 1..21: note = Synthetic
  source 1..21: mol_type = other RNA
tttccctggcctgggatccca

SEQ ID NO: 9889 - RNA, 21 nt, synthetic construct
  misc_feature 1..21: note = Synthetic
  source 1..21: mol_type = other RNA
tttccgacgccatgaatccct

SEQ ID NO: 9890 - RNA, 21 nt, synthetic construct
  misc_feature 1..21: note = Synthetic
  source 1..21: mol_type = other RNA
tttcctcgtcagatttgtcct

SEQ ID NO: 9891 - RNA, 21 nt, synthetic construct
  misc_feature 1..21: note = Synthetic
  source 1..21: mol_type = other RNA
tttcctctgccagcaacgtcg

SEQ ID NO: 9892 - RNA, 21 nt, synthetic construct
  misc_feature 1..21: note = Synthetic
  source 1..21: mol_type = other RNA
tttcctcttcacgcccttggt

SEQ ID NO: 9893 - RNA, 21 nt, synthetic construct
  misc_feature 1..21: note = Synthetic
  source 1..21: mol_type = other RNA
tttcctggcttaaggaaggta

SEQ ID NO: 9894 - RNA, 21 nt, synthetic construct
  misc_feature 1..21: note = Synthetic
  source 1..21: mol_type = other RNA
tttcgcatctgtcgcccacgt

SEQ ID NO: 9895 - RNA, 21 nt, synthetic construct
  misc_feature 1..21: note = Synthetic
  source 1..21: mol_type = other RNA
tttcgcatctgtcgcccactg

SEQ ID NO: 9896 - RNA, 21 nt, synthetic construct
  misc_feature 1..21: note = Synthetic
  source 1..21: mol_type = other RNA
tttctcttatccttcacgagg

SEQ ID NO: 9897 - RNA, 21 nt, synthetic construct
  misc_feature 1..21: note = Synthetic
  source 1..21: mol_type = other RNA
tttctgaaatagggtcttcat

SEQ ID NO: 9898 - RNA, 21 nt, synthetic construct
  misc_feature 1..21: note = Synthetic
  source 1..21: mol_type = other RNA
tttcttgatcttggcgggagt

SEQ ID NO: 9899 - RNA, 21 nt, synthetic construct
  misc_feature 1..21: note = Synthetic
  source 1..21: mol_type = other RNA
tttctttcgcatctgtcgccc

SEQ ID NO: 9900 - RNA, 21 nt, synthetic construct
  misc_feature 1..21: note = Synthetic
  source 1..21: mol_type = other RNA
tttgaagtcccggtcaacctg

SEQ ID NO: 9901 - RNA, 21 nt, synthetic construct
  misc_feature 1..21: note = Synthetic
  source 1..21: mol_type = other RNA
tttgaataaaacaaggccggc

SEQ ID NO: 9902 - RNA, 21 nt, synthetic construct
  misc_feature 1..21: note = Synthetic
  source 1..21: mol_type = other RNA
tttgagacggagtctcgctct

SEQ ID NO: 9903 - RNA, 21 nt, synthetic construct
  misc_feature 1..21: note = Synthetic
  source 1..21: mol_type = other RNA
tttgaggattgtgtcacggtg

SEQ ID NO: 9904 - RNA, 21 nt, synthetic construct
  misc_feature 1..21: note = Synthetic
  source 1..21: mol_type = other RNA
tttgatgggttcatctgacca

SEQ ID NO: 9905 - RNA, 21 nt, synthetic construct
  misc_feature 1..21: note = Synthetic
  source 1..21: mol_type = other RNA
tttgcaaaaataaatagattt

SEQ ID NO: 9906 - RNA, 21 nt, synthetic construct
  misc_feature 1..21: note = Synthetic
  source 1..21: mol_type = other RNA
tttgcaggtgacagacaagca

SEQ ID NO: 9907 - RNA, 21 nt, synthetic construct
  misc_feature 1..21: note = Synthetic
  source 1..21: mol_type = other RNA
tttgcatagaagtggaagcac

SEQ ID NO: 9908 - RNA, 21 nt, synthetic construct
  misc_feature 1..21: note = Synthetic
  source 1..21: mol_type = other RNA
tttggagtcaacccagtagag

SEQ ID NO: 9909 - RNA, 21 nt, synthetic construct
  misc_feature 1..21: note = Synthetic
  source 1..21: mol_type = other RNA
tttggcttagagattggtgga

SEQ ID NO: 9910 - RNA, 21 nt, synthetic construct
  misc_feature 1..21: note = Synthetic
  source 1..21: mol_type = other RNA
tttggtctcggtgccaccacg

SEQ ID NO: 9911 - RNA, 21 nt, synthetic construct
  misc_feature 1..21: note = Synthetic
  source 1..21: mol_type = other RNA
tttggtcttctctgtctttga

SEQ ID NO: 9912 - RNA, 21 nt, synthetic construct
  misc_feature 1..21: note = Synthetic
  source 1..21: mol_type = other RNA
tttggtgaatgagtttggtct

SEQ ID NO: 9913 - RNA, 21 nt, synthetic construct
  misc_feature 1..21: note = Synthetic
  source 1..21: mol_type = other RNA
tttggtttttgtagagatggg

SEQ ID NO: 9914 - RNA, 21 nt, synthetic construct
  misc_feature 1..21: note = Synthetic
  source 1..21: mol_type = other RNA
tttgtacataaagaagaggca

SEQ ID NO: 9915 - RNA, 21 nt, synthetic construct
  misc_feature 1..21: note = Synthetic
  source 1..21: mol_type = other RNA
tttgtagagatgggatctcgc

SEQ ID NO: 9916 - RNA, 21 nt, synthetic construct
  misc_feature 1..21: note = Synthetic
  source 1..21: mol_type = other RNA
tttgtatttttagtagagacg

SEQ ID NO: 9917 - RNA, 21 nt, synthetic construct
  misc_feature 1..21: note = Synthetic
  source 1..21: mol_type = other RNA
tttgtccagggtgatgcattc

SEQ ID NO: 9918 - RNA, 21 nt, synthetic construct
  misc_feature 1..21: note = Synthetic
  source 1..21: mol_type = other RNA
tttgtccctggggacaattgc

SEQ ID NO: 9919 - RNA, 21 nt, synthetic construct
  misc_feature 1..21: note = Synthetic
  source 1..21: mol_type = other RNA
tttgtcctcaaagacggccaa

SEQ ID NO: 9920 - RNA, 21 nt, synthetic construct
  misc_feature 1..21: note = Synthetic
  source 1..21: mol_type = other RNA
tttgtccttgcagtcggggcc

SEQ ID NO: 9921 - RNA, 21 nt, synthetic construct
  misc_feature 1..21: note = Synthetic
  source 1..21: mol_type = other RNA
tttgtgacaggaaccgcggag

SEQ ID NO: 9922 - RNA, 21 nt, synthetic construct
  misc_feature 1..21: note = Synthetic
  source 1..21: mol_type = other RNA
tttgttgctcaggcctggtct

SEQ ID NO: 9923 - RNA, 21 nt, synthetic construct
  misc_feature 1..21: note = Synthetic
  source 1..21: mol_type = other RNA
tttgttttttttttttgagac

SEQ ID NO: 9924 - RNA, 21 nt, synthetic construct
  misc_feature 1..21: note = Synthetic
  source 1..21: mol_type = other RNA
ttttaaacacatacccatcaa

SEQ ID NO: 9925 - RNA, 21 nt, synthetic construct
  misc_feature 1..21: note = Synthetic
  source 1..21: mol_type = other RNA
ttttaactttttggtttttgt

SEQ ID NO: 9926 - RNA, 21 nt, synthetic construct
  misc_feature 1..21: note = Synthetic
  source 1..21: mol_type = other RNA
ttttaagagatggggtcttac

SEQ ID NO: 9927 - RNA, 21 nt, synthetic construct
  misc_feature 1..21: note = Synthetic
  source 1..21: mol_type = other RNA
ttttagtagagacggggtttc

SEQ ID NO: 9928 - RNA, 21 nt, synthetic construct
  misc_feature 1..21: note = Synthetic
  source 1..21: mol_type = other RNA
ttttatagttgtatttctgaa

SEQ ID NO: 9929 - RNA, 21 nt, synthetic construct
  misc_feature 1..21: note = Synthetic
  source 1..21: mol_type = other RNA
ttttatatatatgtgtgtata

SEQ ID NO: 9930 - RNA, 21 nt, synthetic construct
  misc_feature 1..21: note = Synthetic
  source 1..21: mol_type = other RNA
ttttcagccaacaagttgaca

SEQ ID NO: 9931 - RNA, 21 nt, synthetic construct
  misc_feature 1..21: note = Synthetic
  source 1..21: mol_type = other RNA
ttttcagtcaccagcgagtag

SEQ ID NO: 9932 - RNA, 21 nt, synthetic construct
  misc_feature 1..21: note = Synthetic
  source 1..21: mol_type = other RNA
ttttcatcctccaagatggtc

SEQ ID NO: 9933 - RNA, 21 nt, synthetic construct
  misc_feature 1..21: note = Synthetic
  source 1..21: mol_type = other RNA
ttttcctcgtcagatttgtcc

SEQ ID NO: 9934 - RNA, 21 nt, synthetic construct
  misc_feature 1..21: note = Synthetic
  source 1..21: mol_type = other RNA
ttttcctcttcacgcccttgg

SEQ ID NO: 9935 - RNA, 21 nt, synthetic construct
  misc_feature 1..21: note = Synthetic
  source 1..21: mol_type = other RNA
ttttgagacggagtctcgctc

SEQ ID NO: 9936 - RNA, 21 nt, synthetic construct
  misc_feature 1..21: note = Synthetic
  source 1..21: mol_type = other RNA
ttttggtttttgtagagatgg

SEQ ID NO: 9937 - RNA, 21 nt, synthetic construct
  misc_feature 1..21: note = Synthetic
  source 1..21: mol_type = other RNA
ttttgtagagatgggatctcg

SEQ ID NO: 9938 - RNA, 21 nt, synthetic construct
  misc_feature 1..21: note = Synthetic
  source 1..21: mol_type = other RNA
ttttgtatttttagtagagac

SEQ ID NO: 9939 - RNA, 21 nt, synthetic construct
  misc_feature 1..21: note = Synthetic
  source 1..21: mol_type = other RNA
ttttgtccctggggacaattg

SEQ ID NO: 9940 - RNA, 21 nt, synthetic construct
  misc_feature 1..21: note = Synthetic
  source 1..21: mol_type = other RNA
ttttgttttttttttttgaga

SEQ ID NO: 9941 - RNA, 21 nt, synthetic construct
  misc_feature 1..21: note = Synthetic
  source 1..21: mol_type = other RNA
tttttaactttttggtttttg

SEQ ID NO: 9942 - RNA, 21 nt, synthetic construct
  misc_feature 1..21: note = Synthetic
  source 1..21: mol_type = other RNA
tttttaagagatggggtctta

SEQ ID NO: 9943 - RNA, 21 nt, synthetic construct
  misc_feature 1..21: note = Synthetic
  source 1..21: mol_type = other RNA
tttttagtagagacggggttt

SEQ ID NO: 9944 - RNA, 21 nt, synthetic construct
  misc_feature 1..21: note = Synthetic
  source 1..21: mol_type = other RNA
tttttatagttgtatttctga

SEQ ID NO: 9945 - RNA, 21 nt, synthetic construct
  misc_feature 1..21: note = Synthetic
  source 1..21: mol_type = other RNA
tttttgagacggagtctcgct

SEQ ID NO: 9946 - RNA, 21 nt, synthetic construct
  misc_feature 1..21: note = Synthetic
  source 1..21: mol_type = other RNA
tttttggtttttgtagagatg

SEQ ID NO: 9947 - RNA, 21 nt, synthetic construct
  misc_feature 1..21: note = Synthetic
  source 1..21: mol_type = other RNA
tttttgtagagatgggatctc

SEQ ID NO: 9948 - RNA, 21 nt, synthetic construct
  misc_feature 1..21: note = Synthetic
  source 1..21: mol_type = other RNA
tttttgtatttttagtagaga

SEQ ID NO: 9949 - RNA, 21 nt, synthetic construct
  misc_feature 1..21: note = Synthetic
  source 1..21: mol_type = other RNA
tttttgttttttttttttgag

SEQ ID NO: 9950 - RNA, 21 nt, synthetic construct
  misc_feature 1..21: note = Synthetic
  source 1..21: mol_type = other RNA
ttttttaagagatggggtctt

SEQ ID NO: 9951 - RNA, 21 nt, synthetic construct
  misc_feature 1..21: note = Synthetic
  source 1..21: mol_type = other RNA
ttttttatagttgtatttctg

SEQ ID NO: 9952 - RNA, 21 nt, synthetic construct
  misc_feature 1..21: note = Synthetic
  source 1..21: mol_type = other RNA
ttttttgagacggagtctcgc

SEQ ID NO: 9953 - RNA, 21 nt, synthetic construct
  misc_feature 1..21: note = Synthetic
  source 1..21: mol_type = other RNA
ttttttgtatttttagtagag

SEQ ID NO: 9954 - RNA, 21 nt, synthetic construct
  misc_feature 1..21: note = Synthetic
  source 1..21: mol_type = other RNA
ttttttgttttttttttttga

SEQ ID NO: 9955 - RNA, 21 nt, synthetic construct
  misc_feature 1..21: note = Synthetic
  source 1..21: mol_type = other RNA
tttttttatagttgtatttct

SEQ ID NO: 9956 - RNA, 21 nt, synthetic construct
  misc_feature 1..21: note = Synthetic
  source 1..21: mol_type = other RNA
tttttttgagacggagtctcg

SEQ ID NO: 9957 - RNA, 21 nt, synthetic construct
  misc_feature 1..21: note = Synthetic
  source 1..21: mol_type = other RNA
tttttttgttttttttttttg

SEQ ID NO: 9958 - RNA, 21 nt, synthetic construct
  misc_feature 1..21: note = Synthetic
  source 1..21: mol_type = other RNA
ttttttttgagacggagtctc

SEQ ID NO: 9959 - RNA, 21 nt, synthetic construct
  misc_feature 1..21: note = Synthetic
  source 1..21: mol_type = other RNA
ttttttttgtttttttttttt

SEQ ID NO: 9960 - RNA, 21 nt, synthetic construct
  misc_feature 1..21: note = Synthetic
  source 1..21: mol_type = other RNA
tttttttttgagacggagtct

SEQ ID NO: 9961 - RNA, 21 nt, synthetic construct
  misc_feature 1..21: note = Synthetic
  source 1..21: mol_type = other RNA
tttttttttgttttttttttt

SEQ ID NO: 9962 - RNA, 21 nt, synthetic construct
  misc_feature 1..21: note = Synthetic
  source 1..21: mol_type = other RNA
ttttttttttgagacggagtc

SEQ ID NO: 9963 - RNA, 21 nt, synthetic construct
  misc_feature 1..21: note = Synthetic
  source 1..21: mol_type = other RNA
tttttttttttgagacggagt

SEQ ID NO: 9964 - RNA, 21 nt, synthetic construct
  misc_feature 1..21: note = Synthetic
  source 1..21: mol_type = other RNA
ttttttttttttgagacggag

SEQ ID NO: 9965 - DNA, 23 bp, synthetic construct
  misc_feature 1..23: note = Synthetic
  modified_base 2: mod_base = OTHER; note = uracil
  modified_base 5: mod_base = OTHER; note = uracil
  modified_base 12..14: mod_base = OTHER; note = uracil
  source 1..23: mol_type = other DNA
ttgctaacgcctttggaggcsct

SEQ ID NO: 9966 - DNA, 22 bp, synthetic construct
  misc_feature 1..22: note = Synthetic
  modified_base 2: mod_base = OTHER; note = uracil
  modified_base 5..6: mod_base = OTHER; note = uracil
  modified_base 9: mod_base = OTHER; note = uracil
  modified_base 11..12: mod_base = OTHER; note = uracil
  modified_base 17: mod_base = OTHER; note = uracil
  modified_base 20: mod_base = OTHER; note = uracil
  modified_base 22: mod_base = OTHER; note = uracil
  source 1..22: mol_type = other DNA
ttcgttggtcttgcactcctst

SEQ ID NO: 9967 - DNA, 22 bp, synthetic construct
  misc_feature 1..22: note = Synthetic
  modified_base 7: mod_base = OTHER; note = uracil
  modified_base 11..12: mod_base = OTHER; note = uracil
  modified_base 14: mod_base = OTHER; note = uracil
  modified_base 16..17: mod_base = OTHER; note = uracil
  modified_base 19..20: mod_base = OTHER; note = uracil
  source 1..22: mol_type = other DNA
taccagtagattctattgttsg

SEQ ID NO: 9968 - DNA, 22 bp, synthetic construct
  misc_feature 1..22: note = Synthetic
  modified_base 2: mod_base = OTHER; note = uracil
  modified_base 4: mod_base = OTHER; note = uracil
  modified_base 7: mod_base = OTHER; note = uracil
  modified_base 16..17: mod_base = OTHER; note = uracil
  source 1..22: mol_type = other DNA
ttgtcgtaggacaagttaggsg

SEQ ID NO: 9969 - DNA, 22 bp, synthetic construct
  misc_feature 1..22: note = Synthetic
  modified_base 3: mod_base = OTHER; note = uracil
  modified_base 7: mod_base = OTHER; note = uracil
  modified_base 12: mod_base = OTHER; note = uracil
  modified_base 14: mod_base = OTHER; note = uracil
  source 1..22: mol_type = other DNA
tgtggatccagtctaccgccsa

SEQ ID NO: 9970 - DNA, 22 bp, synthetic construct
  misc_feature 1..22: note = Synthetic
  modified_base 2..3: mod_base = OTHER; note = uracil
  modified_base 10..11: mod_base = OTHER; note = uracil
  modified_base 14: mod_base = OTHER; note = uracil
  modified_base 16: mod_base = OTHER; note = uracil
  source 1..22: mol_type = other DNA
tttacgcccttggtgtcagcsc

SEQ ID NO: 9971 - DNA, 22 bp, synthetic construct
  misc_feature 1..22: note = Synthetic
  modified_base 3: mod_base = OTHER; note = uracil
  modified_base 8: mod_base = OTHER; note = uracil
  modified_base 12: mod_base = OTHER; note = uracil
  modified_base 14: mod_base = OTHER; note = uracil
  modified_base 18: mod_base = OTHER; note = uracil
  modified_base 20: mod_base = OTHER; note = uracil
  source 1..22: mol_type = other DNA
tctacgatggctctgggtctsg

SEQ ID NO: 9972 - DNA, 22 bp, synthetic construct
  misc_feature 1..22: note = Synthetic
  modified_base 2: mod_base = OTHER; note = uracil
  modified_base 4..5: mod_base = OTHER; note = uracil
  modified_base 16..17: mod_base = OTHER; note = uracil
  modified_base 20: mod_base = OTHER; note = uracil
  source 1..22: mol_type = other DNA
ttcttcagccgccagttcctsc

SEQ ID NO: 9973 - DNA, 22 bp, synthetic construct
  misc_feature 1..22: note = Synthetic
  modified_base 4: mod_base = OTHER; note = uracil
  modified_base 11: mod_base = OTHER; note = uracil
  modified_base 13: mod_base = OTHER; note = uracil
  modified_base 20: mod_base = OTHER; note = uracil
  source 1..22: mol_type = other DNA
tagtaccgaatgtcacgagtsc

SEQ ID NO: 9974 - DNA, 22 bp, synthetic construct
  misc_feature 1..22: note = Synthetic
  modified_base 9: mod_base = OTHER; note = uracil
  modified_base 13: mod_base = OTHER; note = uracil
  modified_base 15: mod_base = OTHER; note = uracil
  modified_base 17: mod_base = OTHER; note = uracil
  modified_base 22: mod_base = OTHER; note = uracil
  source 1..22: mol_type = other DNA
tgaaaccatgcgtgtatcccst

SEQ ID NO: 9975 - DNA, 21 bp, synthetic construct
  misc_feature 1..21: note = Synthetic
  source 1..21: mol_type = other DNA
aaaaaatccccactatctgta

SEQ ID NO: 9976 - DNA, 21 bp, synthetic construct
  misc_feature 1..21: note = Synthetic
  source 1..21: mol_type = other DNA
aaaaaccttctatacagtggt

SEQ ID NO: 9977 - DNA, 21 bp, synthetic construct
  misc_feature 1..21: note = Synthetic
  source 1..21: mol_type = other DNA
aaaaagcgttgcacacagtcc

SEQ ID NO: 9978 - DNA, 21 bp, synthetic construct
  misc_feature 1..21: note = Synthetic
  source 1..21: mol_type = other DNA
aaaaagtgacacccatctccc

SEQ ID NO: 9979 - DNA, 21 bp, synthetic construct
  misc_feature 1..21: note = Synthetic
  source 1..21: mol_type = other DNA
aaaaataaatagattttatat

SEQ ID NO: 9980 - DNA, 21 bp, synthetic construct
  misc_feature 1..21: note = Synthetic
  source 1..21: mol_type = other DNA
aaaaatccccactatctgtac

SEQ ID NO: 9981 - DNA, 21 bp, synthetic construct
  misc_feature 1..21: note = Synthetic
  source 1..21: mol_type = other DNA
aaaacaaagctctggcaggca

SEQ ID NO: 9982 - DNA, 21 bp, synthetic construct
  misc_feature 1..21: note = Synthetic
  source 1..21: mol_type = other DNA
aaaacaaggccggcgaggtct

SEQ ID NO: 9983 - DNA, 21 bp, synthetic construct
  misc_feature 1..21: note = Synthetic
  source 1..21: mol_type = other DNA
aaaacagtgcaaaataataac

SEQ ID NO: 9984 - DNA, 21 bp, synthetic construct
  misc_feature 1..21: note = Synthetic
  source 1..21: mol_type = other DNA
aaaaccttctatacagtggtt

SEQ ID NO: 9985 - DNA, 21 bp, synthetic construct
  misc_feature 1..21: note = Synthetic
  source 1..21: mol_type = other DNA
aaaacttcctggagagaaatg

SEQ ID NO: 9986 - DNA, 21 bp, synthetic construct
  misc_feature 1..21: note = Synthetic
  source 1..21: mol_type = other DNA
aaaagcgttgcacacagtcca

SEQ ID NO: 9987 - DNA, 21 bp, synthetic construct
  misc_feature 1..21: note = Synthetic
  source 1..21: mol_type = other DNA
aaaagtgacacccatctccca

SEQ ID NO: 9988 - DNA, 21 bp, synthetic construct
  misc_feature 1..21: note = Synthetic
  source 1..21: mol_type = other DNA
aaaataaatagattttatata

SEQ ID NO: 9989 - DNA, 21 bp, synthetic construct
  misc_feature 1..21: note = Synthetic
  source 1..21: mol_type = other DNA
aaaataataacacaaatgcca

SEQ ID NO: 9990 - DNA, 21 bp, synthetic construct
  misc_feature 1..21: note = Synthetic
  source 1..21: mol_type = other DNA
aaaatactttgtcctcaaaga

SEQ ID NO: 9991 - DNA, 21 bp, synthetic construct
  misc_feature 1..21: note = Synthetic
  source 1..21: mol_type = other DNA
aaaatcccaacccaagccatt

SEQ ID NO: 9992 - DNA, 21 bp, synthetic construct
  misc_feature 1..21: note = Synthetic
  source 1..21: mol_type = other DNA
aaaatccccactatctgtaca

SEQ ID NO: 9993 - DNA, 21 bp, synthetic construct
  misc_feature 1..21: note = Synthetic
  source 1..21: mol_type = other DNA
aaaatggcttcgttgatgata

SEQ ID NO: 9994 - DNA, 21 bp, synthetic construct
  misc_feature 1..21: note = Synthetic
  source 1..21: mol_type = other DNA
aaacaaagctctggcaggcaa

SEQ ID NO: 9995 - DNA, 21 bp, synthetic construct
  misc_feature 1..21: note = Synthetic
  source 1..21: mol_type = other DNA
aaacaaggccggcgaggtctc

SEQ ID NO: 9996 - DNA, 21 bp, synthetic construct
  misc_feature 1..21: note = Synthetic
  source 1..21: mol_type = other DNA
aaacacatacccatcaacgac

SEQ ID NO: 9997 - DNA, 21 bp, synthetic construct
  misc_feature 1..21: note = Synthetic
  source 1..21: mol_type = other DNA
aaacacgttgactcctgagtt

SEQ ID NO: 9998 - DNA, 21 bp, synthetic construct
  misc_feature 1..21: note = Synthetic
  source 1..21: mol_type = other DNA
aaacagtgcaaaataataaca

SEQ ID NO: 9999 - DNA, 21 bp, synthetic construct
  misc_feature 1..21: note = Synthetic
  source 1..21: mol_type = other DNA
aaacataacaaaaaatcccca

SEQ ID NO: 10000 - DNA, 21 bp, synthetic construct
  misc_feature 1..21: note = Synthetic
  source 1..21: mol_type = other DNA
aaaccaaaatcccaacccaag

SEQ ID NO: 10001 - DNA, 21 bp, synthetic construct
  misc_feature 1..21: note = Synthetic
  source 1..21: mol_type = other DNA
aaaccagaaaggcttatcacg

SEQ ID NO: 10002 - DNA, 21 bp, synthetic construct
  misc_feature 1..21: note = Synthetic
  source 1..21: mol_type = other DNA
aaaccatcctcccacctcagc

SEQ ID NO: 10003 - DNA, 21 bp, synthetic construct
  misc_feature 1..21: note = Synthetic
  source 1..21: mol_type = other DNA
aaacccacctcgaaagacact

SEQ ID NO: 10004 - DNA, 21 bp, synthetic construct
  misc_feature 1..21: note = Synthetic
  source 1..21: mol_type = other DNA
aaaccctggcttcccgcgatt

SEQ ID NO: 10005 - DNA, 21 bp, synthetic construct
  misc_feature 1..21: note = Synthetic
  source 1..21: mol_type = other DNA
aaaccggggacttcgccagga

SEQ ID NO: 10006 - DNA, 21 bp, synthetic construct
  misc_feature 1..21: note = Synthetic
  source 1..21: mol_type = other DNA
aaaccttctatacagtggttt

SEQ ID NO: 10007 - DNA, 21 bp, synthetic construct
  misc_feature 1..21: note = Synthetic
  source 1..21: mol_type = other DNA
aaacgatccagactggaggat

SEQ ID NO: 10008 - DNA, 21 bp, synthetic construct
  misc_feature 1..21: note = Synthetic
  source 1..21: mol_type = other DNA
aaactcaaaacttcctggaga

SEQ ID NO: 10009 - DNA, 21 bp, synthetic construct
  misc_feature 1..21: note = Synthetic
  source 1..21: mol_type = other DNA
aaactcgtcctgggagcacgt

SEQ ID NO: 10010 - DNA, 21 bp, synthetic construct
  misc_feature 1..21: note = Synthetic
  source 1..21: mol_type = other DNA
aaacttcctggagagaaatgg

SEQ ID NO: 10011 - DNA, 21 bp, synthetic construct
  misc_feature 1..21: note = Synthetic
  source 1..21: mol_type = other DNA
aaacttgggcgagtgggggtt

SEQ ID NO: 10012 - DNA, 21 bp, synthetic construct
  misc_feature 1..21: note = Synthetic
  source 1..21: mol_type = other DNA
aaagaacctgaagtcccgtca

SEQ ID NO: 10013 - DNA, 21 bp, synthetic construct
  misc_feature 1..21: note = Synthetic
  source 1..21: mol_type = other DNA
aaagaagaggcatttcagagg

SEQ ID NO: 10014 - DNA, 21 bp, synthetic construct
  misc_feature 1..21: note = Synthetic
  source 1..21: mol_type = other DNA
aaagacactgggtgggtcatg

SEQ ID NO: 10015 - DNA, 21 bp, synthetic construct
  misc_feature 1..21: note = Synthetic
  source 1..21: mol_type = other DNA
aaagacccctacagcgctgcg

SEQ ID NO: 10016 - DNA, 21 bp, synthetic construct
  misc_feature 1..21: note = Synthetic
  source 1..21: mol_type = other DNA
aaagacgacaatggcagttct

SEQ ID NO: 10017 - DNA, 21 bp, synthetic construct
  misc_feature 1..21: note = Synthetic
  source 1..21: mol_type = other DNA
aaagacggccaaggagaaggg

SEQ ID NO: 10018 - DNA, 21 bp, synthetic construct
  misc_feature 1..21: note = Synthetic
  source 1..21: mol_type = other DNA
aaagcagtggcataatcatag

SEQ ID NO: 10019 - DNA, 21 bp, synthetic construct
  misc_feature 1..21: note = Synthetic
  source 1..21: mol_type = other DNA
aaagccacttgcttctctggg

SEQ ID NO: 10020 - DNA, 21 bp, synthetic construct
  misc_feature 1..21: note = Synthetic
  source 1..21: mol_type = other DNA
aaagcgttgcacacagtccag

SEQ ID NO: 10021 - DNA, 21 bp, synthetic construct
  misc_feature 1..21: note = Synthetic
  source 1..21: mol_type = other DNA
aaagctctggcaggcaatgct

SEQ ID NO: 10022 - DNA, 21 bp, synthetic construct
  misc_feature 1..21: note = Synthetic
  source 1..21: mol_type = other DNA
aaaggaagaaaccaaaatccc

SEQ ID NO: 10023 - DNA, 21 bp, synthetic construct
  misc_feature 1..21: note = Synthetic
  source 1..21: mol_type = other DNA
aaaggaagacgaggagcacga

SEQ ID NO: 10024 - DNA, 21 bp, synthetic construct
  misc_feature 1..21: note = Synthetic
  source 1..21: mol_type = other DNA
aaaggaagacgaggagcactg

SEQ ID NO: 10025 - DNA, 21 bp, synthetic construct
  misc_feature 1..21: note = Synthetic
  source 1..21: mol_type = other DNA
aaaggctaacctggctgtcta

SEQ ID NO: 10026 - DNA, 21 bp, synthetic construct
  misc_feature 1..21: note = Synthetic
  source 1..21: mol_type = other DNA
aaaggcttatcacggttccct

SEQ ID NO: 10027 - DNA, 21 bp, synthetic construct
  misc_feature 1..21: note = Synthetic
  source 1..21: mol_type = other DNA
aaagtgacacccatctcccag

SEQ ID NO: 10028 - DNA, 21 bp, synthetic construct
  misc_feature 1..21: note = Synthetic
  source 1..21: mol_type = other DNA
aaagtgcaaacataacaaaaa

SEQ ID NO: 10029 - DNA, 21 bp, synthetic construct
  misc_feature 1..21: note = Synthetic
  source 1..21: mol_type = other DNA
aaagtgcaaggagaccacggg

SEQ ID NO: 10030 - DNA, 21 bp, synthetic construct
  misc_feature 1..21: note = Synthetic
  source 1..21: mol_type = other DNA
aaagtgctgggattacaggcg

SEQ ID NO: 10031 - DNA, 21 bp, synthetic construct
  misc_feature 1..21: note = Synthetic
  source 1..21: mol_type = other DNA
aaagttgatgctgttgatgtt

SEQ ID NO: 10032 - DNA, 21 bp, synthetic construct
  misc_feature 1..21: note = Synthetic
  source 1..21: mol_type = other DNA
aaataaatagattttatatat

SEQ ID NO: 10033 - DNA, 21 bp, synthetic construct
  misc_feature 1..21: note = Synthetic
  source 1..21: mol_type = other DNA
aaataataacacaaatgccaa

SEQ ID NO: 10034 - DNA, 21 bp, synthetic construct
  misc_feature 1..21: note = Synthetic
  source 1..21: mol_type = other DNA
aaataatctttgtacataaag

SEQ ID NO: 10035 - DNA, 21 bp, synthetic construct
  misc_feature 1..21: note = Synthetic
  source 1..21: mol_type = other DNA
aaatacagcaaccagggtttg

SEQ ID NO: 10036 - DNA, 21 bp, synthetic construct
  misc_feature 1..21: note = Synthetic
  source 1..21: mol_type = other DNA
aaatactttgtcctcaaagac

SEQ ID NO: 10037 - DNA, 21 bp, synthetic construct
  misc_feature 1..21: note = Synthetic
  source 1..21: mol_type = other DNA
aaatagattttatatatatgt

SEQ ID NO: 10038 - DNA, 21 bp, synthetic construct
  misc_feature 1..21: note = Synthetic
  source 1..21: mol_type = other DNA
aaatagggtcttcatctgttg

SEQ ID NO: 10039 - DNA, 21 bp, synthetic construct
  misc_feature 1..21: note = Synthetic
  source 1..21: mol_type = other DNA
aaatatataaaacaaagctct

SEQ ID NO: 10040 - DNA, 21 bp, synthetic construct
  misc_feature 1..21: note = Synthetic
  source 1..21: mol_type = other DNA
aaatattaagggtgaccagtg

SEQ ID NO: 10041 - DNA, 21 bp, synthetic construct
  misc_feature 1..21: note = Synthetic
  source 1..21: mol_type = other DNA
aaatcccaacccaagccattg

SEQ ID NO: 10042 - DNA, 21 bp, synthetic construct
  misc_feature 1..21: note = Synthetic
  source 1..21: mol_type = other DNA
aaatccccactatctgtacag

SEQ ID NO: 10043 - DNA, 21 bp, synthetic construct
  misc_feature 1..21: note = Synthetic
  source 1..21: mol_type = other DNA
aaatgccaaatgtacacagtg

SEQ ID NO: 10044 - DNA, 21 bp, synthetic construct
  misc_feature 1..21: note = Synthetic
  source 1..21: mol_type = other DNA
aaatgcctgagctcaaaccat

SEQ ID NO: 10045 - DNA, 21 bp, synthetic construct
  misc_feature 1..21: note = Synthetic
  source 1..21: mol_type = other DNA
aaatggaggtgtcatcctggt

SEQ ID NO: 10046 - DNA, 21 bp, synthetic construct
  misc_feature 1..21: note = Synthetic
  source 1..21: mol_type = other DNA
aaatggcttcgttgatgatat

SEQ ID NO: 10047 - DNA, 21 bp, synthetic construct
  misc_feature 1..21: note = Synthetic
  source 1..21: mol_type = other DNA
aaatgtacacagtgtacaact

SEQ ID NO: 10048 - DNA, 21 bp, synthetic construct
  misc_feature 1..21: note = Synthetic
  source 1..21: mol_type = other DNA
aaatgtggacctcatcctctg

SEQ ID NO: 10049 - DNA, 21 bp, synthetic construct
  misc_feature 1..21: note = Synthetic
  source 1..21: mol_type = other DNA
aaattcattttttaagagatg

SEQ ID NO: 10050 - DNA, 21 bp, synthetic construct
  misc_feature 1..21: note = Synthetic
  source 1..21: mol_type = other DNA
aaatttaattgatcacagtaa

SEQ ID NO: 10051 - DNA, 21 bp, synthetic construct
  misc_feature 1..21: note = Synthetic
  source 1..21: mol_type = other DNA
aacaaaaaatccccactatct

SEQ ID NO: 10052 - DNA, 21 bp, synthetic construct
  misc_feature 1..21: note = Synthetic
  source 1..21: mol_type = other DNA
aacaaagctctggcaggcaat

SEQ ID NO: 10053 - DNA, 21 bp, synthetic construct
  misc_feature 1..21: note = Synthetic
  source 1..21: mol_type = other DNA
aacaaatacagcaaccagggt

SEQ ID NO: 10054 - DNA, 21 bp, synthetic construct
  misc_feature 1..21: note = Synthetic
  source 1..21: mol_type = other DNA
aacaaggccggcgaggtctca

SEQ ID NO: 10055 - DNA, 21 bp, synthetic construct
  misc_feature 1..21: note = Synthetic
  source 1..21: mol_type = other DNA
aacaagttgacatcggaacct

SEQ ID NO: 10056 - DNA, 21 bp, synthetic construct
  misc_feature 1..21: note = Synthetic
  source 1..21: mol_type = other DNA
aacacaaatgccaaatgtaca

SEQ ID NO: 10057 - DNA, 21 bp, synthetic construct
  misc_feature 1..21: note = Synthetic
  source 1..21: mol_type = other DNA
aacacacacgacagaaaacag

SEQ ID NO: 10058 - DNA, 21 bp, synthetic construct
  misc_feature 1..21: note = Synthetic
  source 1..21: mol_type = other DNA
aacacatacccatcaacgaca

SEQ ID NO: 10059 - DNA, 21 bp, synthetic construct
  misc_feature 1..21: note = Synthetic
  source 1..21: mol_type = other DNA
aacacggcgatttcagaaaga

SEQ ID NO: 10060 - DNA, 21 bp, synthetic construct
  misc_feature 1..21: note = Synthetic
  source 1..21: mol_type = other DNA
aacacgtaaagacccctacag

SEQ ID NO: 10061 - DNA, 21 bp, synthetic construct
  misc_feature 1..21: note = Synthetic
  source 1..21: mol_type = other DNA
aacacgttgactcctgagttt

SEQ ID NO: 10062 - DNA, 21 bp, synthetic construct
  misc_feature 1..21: note = Synthetic
  source 1..21: mol_type = other DNA
aacagagacagtgcccaggac

SEQ ID NO: 10063 - DNA, 21 bp, synthetic construct
  misc_feature 1..21: note = Synthetic
  source 1..21: mol_type = other DNA
aacagccgccgttgttgtcca

SEQ ID NO: 10064 - DNA, 21 bp, synthetic construct
  misc_feature 1..21: note = Synthetic
  source 1..21: mol_type = other DNA
aacaggatccaccacgatggc

SEQ ID NO: 10065 - DNA, 21 bp, synthetic construct
  misc_feature 1..21: note = Synthetic
  source 1..21: mol_type = other DNA
aacaggtcgggtggttgtgtg

SEQ ID NO: 10066 - DNA, 21 bp, synthetic construct
  misc_feature 1..21: note = Synthetic
  source 1..21: mol_type = other DNA
aacagtaacacggcgatttca

SEQ ID NO: 10067 - DNA, 21 bp, synthetic construct
  misc_feature 1..21: note = Synthetic
  source 1..21: mol_type = other DNA
aacagtgcaaaataataacac

SEQ ID NO: 10068 - DNA, 21 bp, synthetic construct
  misc_feature 1..21: note = Synthetic
  source 1..21: mol_type = other DNA
aacagtttcaaccaatataca

SEQ ID NO: 10069 - DNA, 21 bp, synthetic construct
  misc_feature 1..21: note = Synthetic
  source 1..21: mol_type = other DNA
aacataacaaaaaatccccac

SEQ ID NO: 10070 - DNA, 21 bp, synthetic construct
  misc_feature 1..21: note = Synthetic
  source 1..21: mol_type = other DNA
aaccaaaatcccaacccaagc

SEQ ID NO: 10071 - DNA, 21 bp, synthetic construct
  misc_feature 1..21: note = Synthetic
  source 1..21: mol_type = other DNA
aaccaatatacaaagtgcaaa

SEQ ID NO: 10072 - DNA, 21 bp, synthetic construct
  misc_feature 1..21: note = Synthetic
  source 1..21: mol_type = other DNA
aaccagaaaggcttatcacgg

SEQ ID NO: 10073 - DNA, 21 bp, synthetic construct
  misc_feature 1..21: note = Synthetic
  source 1..21: mol_type = other DNA
aaccagggtttgcaaaaataa

SEQ ID NO: 10074 - DNA, 21 bp, synthetic construct
  misc_feature 1..21: note = Synthetic
  source 1..21: mol_type = other DNA
aaccatatcctctggggacag

SEQ ID NO: 10075 - DNA, 21 bp, synthetic construct
  misc_feature 1..21: note = Synthetic
  source 1..21: mol_type = other DNA
aaccatcctcccacctcagcc

SEQ ID NO: 10076 - DNA, 21 bp, synthetic construct
  misc_feature 1..21: note = Synthetic
  source 1..21: mol_type = other DNA
aacccaagccattgcatgggc

SEQ ID NO: 10077 - DNA, 21 bp, synthetic construct
  misc_feature 1..21: note = Synthetic
  source 1..21: mol_type = other DNA
aacccacctcgaaagacactg

SEQ ID NO: 10078 - DNA, 21 bp, synthetic construct
  misc_feature 1..21: note = Synthetic
  source 1..21: mol_type = other DNA
aacccagtagaggcggccact

SEQ ID NO: 10079 - DNA, 21 bp, synthetic construct
  misc_feature 1..21: note = Synthetic
  source 1..21: mol_type = other DNA
aaccccctacacagggccccg

SEQ ID NO: 10080 - DNA, 21 bp, synthetic construct
  misc_feature 1..21: note = Synthetic
  source 1..21: mol_type = other DNA
aaccctggcttcccgcgattg

SEQ ID NO: 10081 - DNA, 21 bp, synthetic construct
  misc_feature 1..21: note = Synthetic
  source 1..21: mol_type = other DNA
aaccgaggccttgagggtggc

SEQ ID NO: 10082 - DNA, 21 bp, synthetic construct
  misc_feature 1..21: note = Synthetic
  source 1..21: mol_type = other DNA
aaccgcggaggaacgccaggc

SEQ ID NO: 10083 - DNA, 21 bp, synthetic construct
  misc_feature 1..21: note = Synthetic
  source 1..21: mol_type = other DNA
aaccggggacttcgccaggag

SEQ ID NO: 10084 - DNA, 21 bp, synthetic construct
  misc_feature 1..21: note = Synthetic
  source 1..21: mol_type = other DNA
aaccgggtgtctcaggcactt

SEQ ID NO: 10085 - DNA, 21 bp, synthetic construct
  misc_feature 1..21: note = Synthetic
  source 1..21: mol_type = other DNA
aacctccacctcctgggctca

SEQ ID NO: 10086 - DNA, 21 bp, synthetic construct
  misc_feature 1..21: note = Synthetic
  source 1..21: mol_type = other DNA
aacctcgtaaggaaccgaggc

SEQ ID NO: 10087 - DNA, 21 bp, synthetic construct
  misc_feature 1..21: note = Synthetic
  source 1..21: mol_type = other DNA
aacctgaagtcccgtcaaacg

SEQ ID NO: 10088 - DNA, 21 bp, synthetic construct
  misc_feature 1..21: note = Synthetic
  source 1..21: mol_type = other DNA
aacctgcccctctctgtcccc

SEQ ID NO: 10089 - DNA, 21 bp, synthetic construct
  misc_feature 1..21: note = Synthetic
  source 1..21: mol_type = other DNA
aacctggctgtctagcaaggc

SEQ ID NO: 10090 - DNA, 21 bp, synthetic construct
  misc_feature 1..21: note = Synthetic
  source 1..21: mol_type = other DNA
aacctgtgaggcggttggcac

SEQ ID NO: 10091 - DNA, 21 bp, synthetic construct
  misc_feature 1..21: note = Synthetic
  source 1..21: mol_type = other DNA
aaccttctatacagtggttta

SEQ ID NO: 10092 - DNA, 21 bp, synthetic construct
  misc_feature 1..21: note = Synthetic
  source 1..21: mol_type = other DNA
aacgacaagattggggaagtg

SEQ ID NO: 10093 - DNA, 21 bp, synthetic construct
  misc_feature 1..21: note = Synthetic
  source 1..21: mol_type = other DNA
aacgatccagactggaggatt

SEQ ID NO: 10094 - DNA, 21 bp, synthetic construct
  misc_feature 1..21: note = Synthetic
  source 1..21: mol_type = other DNA
aacgcagccaacttcatcgct

SEQ ID NO: 10095 - DNA, 21 bp, synthetic construct
  misc_feature 1..21: note = Synthetic
  source 1..21: mol_type = other DNA
aacggagggcgactcgtgtat

SEQ ID NO: 10096 - DNA, 21 bp, synthetic construct
  misc_feature 1..21: note = Synthetic
  source 1..21: mol_type = other DNA
aacggggacatcattctccca

SEQ ID NO: 10097 - DNA, 21 bp, synthetic construct
  misc_feature 1..21: note = Synthetic
  source 1..21: mol_type = other DNA
aacgtcgcccagagcttggtg

SEQ ID NO: 10098 - DNA, 21 bp, synthetic construct
  misc_feature 1..21: note = Synthetic
  source 1..21: mol_type = other DNA
aacgtttcaacctcgtaagga

SEQ ID NO: 10099 - DNA, 21 bp, synthetic construct
  misc_feature 1..21: note = Synthetic
  source 1..21: mol_type = other DNA
aacgttttcctcttcacgccc

SEQ ID NO: 10100 - DNA, 21 bp, synthetic construct
  misc_feature 1..21: note = Synthetic
  source 1..21: mol_type = other DNA
aactcaaaacttcctggagag

SEQ ID NO: 10101 - DNA, 21 bp, synthetic construct
  misc_feature 1..21: note = Synthetic
  source 1..21: mol_type = other DNA
aactcaagtgatccagctcag

SEQ ID NO: 10102 - DNA, 21 bp, synthetic construct
  misc_feature 1..21: note = Synthetic
  source 1..21: mol_type = other DNA
aactcctgaactcaagtgatc

SEQ ID NO: 10103 - DNA, 21 bp, synthetic construct
  misc_feature 1..21: note = Synthetic
  source 1..21: mol_type = other DNA
aactcgaaggccgagcagggg

SEQ ID NO: 10104 - DNA, 21 bp, synthetic construct
  misc_feature 1..21: note = Synthetic
  source 1..21: mol_type = other DNA
aactcgtcctgggagcacgtc

SEQ ID NO: 10105 - DNA, 21 bp, synthetic construct
  misc_feature 1..21: note = Synthetic
  source 1..21: mol_type = other DNA
aactcgtttctttcgcatctg

SEQ ID NO: 10106 - DNA, 21 bp, synthetic construct
  misc_feature 1..21: note = Synthetic
  source 1..21: mol_type = other DNA
aactctgaactgagaaagtgc

SEQ ID NO: 10107 - DNA, 21 bp, synthetic construct
  misc_feature 1..21: note = Synthetic
  source 1..21: mol_type = other DNA
aactgagaaagtgcaaggaga

SEQ ID NO: 10108 - DNA, 21 bp, synthetic construct
  misc_feature 1..21: note = Synthetic
  source 1..21: mol_type = other DNA
aactgaggaatgcagcggttg

SEQ ID NO: 10109 - DNA, 21 bp, synthetic construct
  misc_feature 1..21: note = Synthetic
  source 1..21: mol_type = other DNA
aactgccgagagatgcacttc

SEQ ID NO: 10110 - DNA, 21 bp, synthetic construct
  misc_feature 1..21: note = Synthetic
  source 1..21: mol_type = other DNA
aacttcatcgctcatgtcctt

SEQ ID NO: 10111 - DNA, 21 bp, synthetic construct
  misc_feature 1..21: note = Synthetic
  source 1..21: mol_type = other DNA
aacttcctggagagaaatgga

SEQ ID NO: 10112 - DNA, 21 bp, synthetic construct
  misc_feature 1..21: note = Synthetic
  source 1..21: mol_type = other DNA
aacttgatcggggctggtggg

SEQ ID NO: 10113 - DNA, 21 bp, synthetic construct
  misc_feature 1..21: note = Synthetic
  source 1..21: mol_type = other DNA
aacttgggcgagtgggggttg

SEQ ID NO: 10114 - DNA, 21 bp, synthetic construct
  misc_feature 1..21: note = Synthetic
  source 1..21: mol_type = other DNA
aacttgttgggtccctcgcag

SEQ ID NO: 10115 - DNA, 21 bp, synthetic construct
  misc_feature 1..21: note = Synthetic
  source 1..21: mol_type = other DNA
aactttttggtttttgtagag

SEQ ID NO: 10116 - DNA, 21 bp, synthetic construct
  misc_feature 1..21: note = Synthetic
  source 1..21: mol_type = other DNA
aagaaaccaaaatcccaaccc

SEQ ID NO: 10117 - DNA, 21 bp, synthetic construct
  misc_feature 1..21: note = Synthetic
  source 1..21: mol_type = other DNA
aagaaatttaattgatcacag

SEQ ID NO: 10118 - DNA, 21 bp, synthetic construct
  misc_feature 1..21: note = Synthetic
  source 1..21: mol_type = other DNA
aagaacctgaagtcccgtcaa

SEQ ID NO: 10119 - DNA, 21 bp, synthetic construct
  misc_feature 1..21: note = Synthetic
  source 1..21: mol_type = other DNA
aagaagaggcatttcagaggc

SEQ ID NO: 10120 - DNA, 21 bp, synthetic construct
  misc_feature 1..21: note = Synthetic
  source 1..21: mol_type = other DNA
aagaagaggtaggcgatggag

SEQ ID NO: 10121 - DNA, 21 bp, synthetic construct
  misc_feature 1..21: note = Synthetic
  source 1..21: mol_type = other DNA
aagacactgggtgggtcatga

SEQ ID NO: 10122 - DNA, 21 bp, synthetic construct
  misc_feature 1..21: note = Synthetic
  source 1..21: mol_type = other DNA
aagacattcaggctacaaaaa

SEQ ID NO: 10123 - DNA, 21 bp, synthetic construct
  misc_feature 1..21: note = Synthetic
  source 1..21: mol_type = other DNA
aagacccccaggcaaaggaag

SEQ ID NO: 10124 - DNA, 21 bp, synthetic construct
  misc_feature 1..21: note = Synthetic
  source 1..21: mol_type = other DNA
aagacccctacagcgctgcgg

SEQ ID NO: 10125 - DNA, 21 bp, synthetic construct
  misc_feature 1..21: note = Synthetic
  source 1..21: mol_type = other DNA
aagacgacaatggcagttctc

SEQ ID NO: 10126 - DNA, 21 bp, synthetic construct
  misc_feature 1..21: note = Synthetic
  source 1..21: mol_type = other DNA
aagacgaggagcacgatgggg

SEQ ID NO: 10127 - DNA, 21 bp, synthetic construct
  misc_feature 1..21: note = Synthetic
  source 1..21: mol_type = other DNA
aagacgaggagcactgtaggg

SEQ ID NO: 10128 - DNA, 21 bp, synthetic construct
  misc_feature 1..21: note = Synthetic
  source 1..21: mol_type = other DNA
aagacggccaaggagaagggg

SEQ ID NO: 10129 - DNA, 21 bp, synthetic construct
  misc_feature 1..21: note = Synthetic
  source 1..21: mol_type = other DNA
aagagaaccatatcctctggg

SEQ ID NO: 10130 - DNA, 21 bp, synthetic construct
  misc_feature 1..21: note = Synthetic
  source 1..21: mol_type = other DNA
aagagacgccgtgggctctgt

SEQ ID NO: 10131 - DNA, 21 bp, synthetic construct
  misc_feature 1..21: note = Synthetic
  source 1..21: mol_type = other DNA
aagagatggggtcttactatg

SEQ ID NO: 10132 - DNA, 21 bp, synthetic construct
  misc_feature 1..21: note = Synthetic
  source 1..21: mol_type = other DNA
aagaggcatttcagaggcaat

SEQ ID NO: 10133 - DNA, 21 bp, synthetic construct
  misc_feature 1..21: note = Synthetic
  source 1..21: mol_type = other DNA
aagaggtaaacacgttgactc

SEQ ID NO: 10134 - DNA, 21 bp, synthetic construct
  misc_feature 1..21: note = Synthetic
  source 1..21: mol_type = other DNA
aagaggtaggcgatggagccc

SEQ ID NO: 10135 - DNA, 21 bp, synthetic construct
  misc_feature 1..21: note = Synthetic
  source 1..21: mol_type = other DNA
aagatctcggctgcagaccaa

SEQ ID NO: 10136 - DNA, 21 bp, synthetic construct
  misc_feature 1..21: note = Synthetic
  source 1..21: mol_type = other DNA
aagatggtcttccggttgccc

SEQ ID NO: 10137 - DNA, 21 bp, synthetic construct
  misc_feature 1..21: note = Synthetic
  source 1..21: mol_type = other DNA
aagattggggaagtgaatggc

SEQ ID NO: 10138 - DNA, 21 bp, synthetic construct
  misc_feature 1..21: note = Synthetic
  source 1..21: mol_type = other DNA
aagcacgtctcctgggactca

SEQ ID NO: 10139 - DNA, 21 bp, synthetic construct
  misc_feature 1..21: note = Synthetic
  source 1..21: mol_type = other DNA
aagcactaggtgggcggacat

SEQ ID NO: 10140 - DNA, 21 bp, synthetic construct
  misc_feature 1..21: note = Synthetic
  source 1..21: mol_type = other DNA
aagcagtcccggtctgagtca

SEQ ID NO: 10141 - DNA, 21 bp, synthetic construct
  misc_feature 1..21: note = Synthetic
  source 1..21: mol_type = other DNA
aagcagtggcataatcatagc

SEQ ID NO: 10142 - DNA, 21 bp, synthetic construct
  misc_feature 1..21: note = Synthetic
  source 1..21: mol_type = other DNA
aagcattcgttggtcccgcac

SEQ ID NO: 10143 - DNA, 21 bp, synthetic construct
  misc_feature 1..21: note = Synthetic
  source 1..21: mol_type = other DNA
aagccactcatacatacaacg

SEQ ID NO: 10144 - DNA, 21 bp, synthetic construct
  misc_feature 1..21: note = Synthetic
  source 1..21: mol_type = other DNA
aagccacttgcttctctgggc

SEQ ID NO: 10145 - DNA, 21 bp, synthetic construct
  misc_feature 1..21: note = Synthetic
  source 1..21: mol_type = other DNA
aagccatgaacaggatccacc

SEQ ID NO: 10146 - DNA, 21 bp, synthetic construct
  misc_feature 1..21: note = Synthetic
  source 1..21: mol_type = other DNA
aagccattgcatgggcactgt

SEQ ID NO: 10147 - DNA, 21 bp, synthetic construct
  misc_feature 1..21: note = Synthetic
  source 1..21: mol_type = other DNA
aagccgccagttcttccatag

SEQ ID NO: 10148 - DNA, 21 bp, synthetic construct
  misc_feature 1..21: note = Synthetic
  source 1..21: mol_type = other DNA
aagccgtcggggcacaggcac

SEQ ID NO: 10149 - DNA, 21 bp, synthetic construct
  misc_feature 1..21: note = Synthetic
  source 1..21: mol_type = other DNA
aagcctgttctgcctcccaga

SEQ ID NO: 10150 - DNA, 21 bp, synthetic construct
  misc_feature 1..21: note = Synthetic
  source 1..21: mol_type = other DNA
aagccttcctcacactggcac

SEQ ID NO: 10151 - DNA, 21 bp, synthetic construct
  misc_feature 1..21: note = Synthetic
  source 1..21: mol_type = other DNA
aagcgttgcacacagtccagt

SEQ ID NO: 10152 - DNA, 21 bp, synthetic construct
  misc_feature 1..21: note = Synthetic
  source 1..21: mol_type = other DNA
aagctccgcttcccgggttca

SEQ ID NO: 10153 - DNA, 21 bp, synthetic construct
  misc_feature 1..21: note = Synthetic
  source 1..21: mol_type = other DNA
aagctctggcaggcaatgctt

SEQ ID NO: 10154 - DNA, 21 bp, synthetic construct
  misc_feature 1..21: note = Synthetic
  source 1..21: mol_type = other DNA
aagctggcgggaccacaggtg

SEQ ID NO: 10155 - DNA, 21 bp, synthetic construct
  misc_feature 1..21: note = Synthetic
  source 1..21: mol_type = other DNA
aagctgggtgctgcagatcat

SEQ ID NO: 10156 - DNA, 21 bp, synthetic construct
  misc_feature 1..21: note = Synthetic
  source 1..21: mol_type = other DNA
aaggaaccgaggccttgaggg

SEQ ID NO: 10157 - DNA, 21 bp, synthetic construct
  misc_feature 1..21: note = Synthetic
  source 1..21: mol_type = other DNA
aaggaagaaaccaaaatccca

SEQ ID NO: 10158 - DNA, 21 bp, synthetic construct
  misc_feature 1..21: note = Synthetic
  source 1..21: mol_type = other DNA
aaggaagacccccaggcaaag

SEQ ID NO: 10159 - DNA, 21 bp, synthetic construct
  misc_feature 1..21: note = Synthetic
  source 1..21: mol_type = other DNA
aaggaagacgaggagcacgat

SEQ ID NO: 10160 - DNA, 21 bp, synthetic construct
  misc_feature 1..21: note = Synthetic
  source 1..21: mol_type = other DNA
aaggaagacgaggagcactgt

SEQ ID NO: 10161 - DNA, 21 bp, synthetic construct
  misc_feature 1..21: note = Synthetic
  source 1..21: mol_type = other DNA
aaggaaggtacaaacccacct

SEQ ID NO: 10162 - DNA, 21 bp, synthetic construct
  misc_feature 1..21: note = Synthetic
  source 1..21: mol_type = other DNA
aaggagaaggggtgggccagc

SEQ ID NO: 10163 - DNA, 21 bp, synthetic construct
  misc_feature 1..21: note = Synthetic
  source 1..21: mol_type = other DNA
aaggagaccacgggaatggaa

SEQ ID NO: 10164 - DNA, 21 bp, synthetic construct
  misc_feature 1..21: note = Synthetic
  source 1..21: mol_type = other DNA
aaggaggggcggggagattct

SEQ ID NO: 10165 - DNA, 21 bp, synthetic construct
  misc_feature 1..21: note = Synthetic
  source 1..21: mol_type = other DNA
aaggccgagcaggggctactg

SEQ ID NO: 10166 - DNA, 21 bp, synthetic construct
  misc_feature 1..21: note = Synthetic
  source 1..21: mol_type = other DNA
aaggccggcgaggtctcagga

SEQ ID NO: 10167 - DNA, 21 bp, synthetic construct
  misc_feature 1..21: note = Synthetic
  source 1..21: mol_type = other DNA
aaggcgacggtccagcgcaat

SEQ ID NO: 10168 - DNA, 21 bp, synthetic construct
  misc_feature 1..21: note = Synthetic
  source 1..21: mol_type = other DNA
aaggctaacctggctgtctag

SEQ ID NO: 10169 - DNA, 21 bp, synthetic construct
  misc_feature 1..21: note = Synthetic
  source 1..21: mol_type = other DNA
aaggcttatcacggttccctg

SEQ ID NO: 10170 - DNA, 21 bp, synthetic construct
  misc_feature 1..21: note = Synthetic
  source 1..21: mol_type = other DNA
aaggcttgcatagaagaggta

SEQ ID NO: 10171 - DNA, 21 bp, synthetic construct
  misc_feature 1..21: note = Synthetic
  source 1..21: mol_type = other DNA
aaggggtgggccagcctcttt

SEQ ID NO: 10172 - DNA, 21 bp, synthetic construct
  misc_feature 1..21: note = Synthetic
  source 1..21: mol_type = other DNA
aagggtgaccagtgactcagg

SEQ ID NO: 10173 - DNA, 21 bp, synthetic construct
  misc_feature 1..21: note = Synthetic
  source 1..21: mol_type = other DNA
aagggttctgggcagggacgg

SEQ ID NO: 10174 - DNA, 21 bp, synthetic construct
  misc_feature 1..21: note = Synthetic
  source 1..21: mol_type = other DNA
aaggtaaccgggtgtctcagg

SEQ ID NO: 10175 - DNA, 21 bp, synthetic construct
  misc_feature 1..21: note = Synthetic
  source 1..21: mol_type = other DNA
aaggtacaaacccacctcgaa

SEQ ID NO: 10176 - DNA, 21 bp, synthetic construct
  misc_feature 1..21: note = Synthetic
  source 1..21: mol_type = other DNA
aaggtcattgcagacgtggga

SEQ ID NO: 10177 - DNA, 21 bp, synthetic construct
  misc_feature 1..21: note = Synthetic
  source 1..21: mol_type = other DNA
aaggtggggacggaggtgtcg

SEQ ID NO: 10178 - DNA, 21 bp, synthetic construct
  misc_feature 1..21: note = Synthetic
  source 1..21: mol_type = other DNA
aagtagctgggatcacaggca

SEQ ID NO: 10179 - DNA, 21 bp, synthetic construct
  misc_feature 1..21: note = Synthetic
  source 1..21: mol_type = other DNA
aagtccccggatttgcaggtg

SEQ ID NO: 10180 - DNA, 21 bp, synthetic construct
  misc_feature 1..21: note = Synthetic
  source 1..21: mol_type = other DNA
aagtcccggtcaacctgcccc

SEQ ID NO: 10181 - DNA, 21 bp, synthetic construct
  misc_feature 1..21: note = Synthetic
  source 1..21: mol_type = other DNA
aagtcccgtcaaacgatccag

SEQ ID NO: 10182 - DNA, 21 bp, synthetic construct
  misc_feature 1..21: note = Synthetic
  source 1..21: mol_type = other DNA
aagtgaatggcttggaggcat

SEQ ID NO: 10183 - DNA, 21 bp, synthetic construct
  misc_feature 1..21: note = Synthetic
  source 1..21: mol_type = other DNA
aagtgacacccatctcccaga

SEQ ID NO: 10184 - DNA, 21 bp, synthetic construct
  misc_feature 1..21: note = Synthetic
  source 1..21: mol_type = other DNA
aagtgataacagtttcaacca

SEQ ID NO: 10185 - DNA, 21 bp, synthetic construct
  misc_feature 1..21: note = Synthetic
  source 1..21: mol_type = other DNA
aagtgatccagctcagcctcc

SEQ ID NO: 10186 - DNA, 21 bp, synthetic construct
  misc_feature 1..21: note = Synthetic
  source 1..21: mol_type = other DNA
aagtgcaaacataacaaaaaa

SEQ ID NO: 10187 - DNA, 21 bp, synthetic construct
  misc_feature 1..21: note = Synthetic
  source 1..21: mol_type = other DNA
aagtgcaaggagaccacggga

SEQ ID NO: 10188 - DNA, 21 bp, synthetic construct
  misc_feature 1..21: note = Synthetic
  source 1..21: mol_type = other DNA
aagtgctgggattacaggcgt

SEQ ID NO: 10189 - DNA, 21 bp, synthetic construct
  misc_feature 1..21: note = Synthetic
  source 1..21: mol_type = other DNA
aagtggaagcactaggtgggc

SEQ ID NO: 10190 - DNA, 21 bp, synthetic construct
  misc_feature 1..21: note = Synthetic
  source 1..21: mol_type = other DNA
aagtggcatcatttggtgaat

SEQ ID NO: 10191 - DNA, 21 bp, synthetic construct
  misc_feature 1..21: note = Synthetic
  source 1..21: mol_type = other DNA
aagtgggtaggggtcgggagg

SEQ ID NO: 10192 - DNA, 21 bp, synthetic construct
  misc_feature 1..21: note = Synthetic
  source 1..21: mol_type = other DNA
aagttgacatcggaacctgtg

SEQ ID NO: 10193 - DNA, 21 bp, synthetic construct
  misc_feature 1..21: note = Synthetic
  source 1..21: mol_type = other DNA
aagttgatgctgttgatgttc

SEQ ID NO: 10194 - DNA, 21 bp, synthetic construct
  misc_feature 1..21: note = Synthetic
  source 1..21: mol_type = other DNA
aagtttggagtcaacccagta

SEQ ID NO: 10195 - DNA, 21 bp, synthetic construct
  misc_feature 1..21: note = Synthetic
  source 1..21: mol_type = other DNA
aataaaacaaggccggcgagg

SEQ ID NO: 10196 - DNA, 21 bp, synthetic construct
  misc_feature 1..21: note = Synthetic
  source 1..21: mol_type = other DNA
aataaatagattttatatata

SEQ ID NO: 10197 - DNA, 21 bp, synthetic construct
  misc_feature 1..21: note = Synthetic
  source 1..21: mol_type = other DNA
aataaatatataaaacaaagc

SEQ ID NO: 10198 - DNA, 21 bp, synthetic construct
  misc_feature 1..21: note = Synthetic
  source 1..21: mol_type = other DNA
aataaatattaagggtgacca

SEQ ID NO: 10199 - DNA, 21 bp, synthetic construct
  misc_feature 1..21: note = Synthetic
  source 1..21: mol_type = other DNA
aataacacaaatgccaaatgt

SEQ ID NO: 10200 - DNA, 21 bp, synthetic construct
  misc_feature 1..21: note = Synthetic
  source 1..21: mol_type = other DNA
aataaccccctacacagggcc

SEQ ID NO: 10201 - DNA, 21 bp, synthetic construct
  misc_feature 1..21: note = Synthetic
  source 1..21: mol_type = other DNA
aataacgttttcctcttcacg

SEQ ID NO: 10202 - DNA, 21 bp, synthetic construct
  misc_feature 1..21: note = Synthetic
  source 1..21: mol_type = other DNA
aataataacacaaatgccaaa

SEQ ID NO: 10203 - DNA, 21 bp, synthetic construct
  misc_feature 1..21: note = Synthetic
  source 1..21: mol_type = other DNA
aataatctttgtacataaaga

SEQ ID NO: 10204 - DNA, 21 bp, synthetic construct
  misc_feature 1..21: note = Synthetic
  source 1..21: mol_type = other DNA
aatacagcaaccagggtttgc

SEQ ID NO: 10205 - DNA, 21 bp, synthetic construct
  misc_feature 1..21: note = Synthetic
  source 1..21: mol_type = other DNA
aatactttgtcctcaaagacg

SEQ ID NO: 10206 - DNA, 21 bp, synthetic construct
  misc_feature 1..21: note = Synthetic
  source 1..21: mol_type = other DNA
aatagattttatatatatgtg

SEQ ID NO: 10207 - DNA, 21 bp, synthetic construct
  misc_feature 1..21: note = Synthetic
  source 1..21: mol_type = other DNA
aatagggtcttcatctgttgc

SEQ ID NO: 10208 - DNA, 21 bp, synthetic construct
  misc_feature 1..21: note = Synthetic
  source 1..21: mol_type = other DNA
aatagtcactgaacaaataca

SEQ ID NO: 10209 - DNA, 21 bp, synthetic construct
  misc_feature 1..21: note = Synthetic
  source 1..21: mol_type = other DNA
aatatacaaagtgcaaacata

SEQ ID NO: 10210 - DNA, 21 bp, synthetic construct
  misc_feature 1..21: note = Synthetic
  source 1..21: mol_type = other DNA
aatatataaaacaaagctctg

SEQ ID NO: 10211 - DNA, 21 bp, synthetic construct
  misc_feature 1..21: note = Synthetic
  source 1..21: mol_type = other DNA
aatattaagggtgaccagtga

SEQ ID NO: 10212 - DNA, 21 bp, synthetic construct
  misc_feature 1..21: note = Synthetic
  source 1..21: mol_type = other DNA
aatcatagctcacgacagcct

SEQ ID NO: 10213 - DNA, 21 bp, synthetic construct
  misc_feature 1..21: note = Synthetic
  source 1..21: mol_type = other DNA
aatcccaacccaagccattgc

SEQ ID NO: 10214 - DNA, 21 bp, synthetic construct
  misc_feature 1..21: note = Synthetic
  source 1..21: mol_type = other DNA
aatccccactatctgtacagg

SEQ ID NO: 10215 - DNA, 21 bp, synthetic construct
  misc_feature 1..21: note = Synthetic
  source 1..21: mol_type = other DNA
aatcccttgtgacatcttcac

SEQ ID NO: 10216 - DNA, 21 bp, synthetic construct
  misc_feature 1..21: note = Synthetic
  source 1..21: mol_type = other DNA
aatccctttcctggcttaagg

SEQ ID NO: 10217 - DNA, 21 bp, synthetic construct
  misc_feature 1..21: note = Synthetic
  source 1..21: mol_type = other DNA
aatctcggctcactgcaagct

SEQ ID NO: 10218 - DNA, 21 bp, synthetic construct
  misc_feature 1..21: note = Synthetic
  source 1..21: mol_type = other DNA
aatctttgtacataaagaaga

SEQ ID NO: 10219 - DNA, 21 bp, synthetic construct
  misc_feature 1..21: note = Synthetic
  source 1..21: mol_type = other DNA
aatgagtttggtctcggtgcc

SEQ ID NO: 10220 - DNA, 21 bp, synthetic construct
  misc_feature 1..21: note = Synthetic
  source 1..21: mol_type = other DNA
aatgcagcggttgacacggcc

SEQ ID NO: 10221 - DNA, 21 bp, synthetic construct
  misc_feature 1..21: note = Synthetic
  source 1..21: mol_type = other DNA
aatgccaaatgtacacagtgt

SEQ ID NO: 10222 - DNA, 21 bp, synthetic construct
  misc_feature 1..21: note = Synthetic
  source 1..21: mol_type = other DNA
aatgcctgagctcaaaccatc

SEQ ID NO: 10223 - DNA, 21 bp, synthetic construct
  misc_feature 1..21: note = Synthetic
  source 1..21: mol_type = other DNA
aatgctttggtcttctctgtc

SEQ ID NO: 10224 - DNA, 21 bp, synthetic construct
  misc_feature 1..21: note = Synthetic
  source 1..21: mol_type = other DNA
aatggaagtgggtaggggtcg

SEQ ID NO: 10225 - DNA, 21 bp, synthetic construct
  misc_feature 1..21: note = Synthetic
  source 1..21: mol_type = other DNA
aatggacagagccctcacgct

SEQ ID NO: 10226 - DNA, 21 bp, synthetic construct
  misc_feature 1..21: note = Synthetic
  source 1..21: mol_type = other DNA
aatggaggtgtcatcctggtc

SEQ ID NO: 10227 - DNA, 21 bp, synthetic construct
  misc_feature 1..21: note = Synthetic
  source 1..21: mol_type = other DNA
aatggcagttctcgatattca

SEQ ID NO: 10228 - DNA, 21 bp, synthetic construct
  misc_feature 1..21: note = Synthetic
  source 1..21: mol_type = other DNA
aatggcttcgttgatgatatc

SEQ ID NO: 10229 - DNA, 21 bp, synthetic construct
  misc_feature 1..21: note = Synthetic
  source 1..21: mol_type = other DNA
aatggcttggaggcatttgca

SEQ ID NO: 10230 - DNA, 21 bp, synthetic construct
  misc_feature 1..21: note = Synthetic
  source 1..21: mol_type = other DNA
aatgtacacagtgtacaactc

SEQ ID NO: 10231 - DNA, 21 bp, synthetic construct
  misc_feature 1..21: note = Synthetic
  source 1..21: mol_type = other DNA
aatgtggacctcatcctctgt

SEQ ID NO: 10232 - DNA, 21 bp, synthetic construct
  misc_feature 1..21: note = Synthetic
  source 1..21: mol_type = other DNA
aatgttttcagtcaccagcga

SEQ ID NO: 10233 - DNA, 21 bp, synthetic construct
  misc_feature 1..21: note = Synthetic
  source 1..21: mol_type = other DNA
aattcattttttaagagatgg

SEQ ID NO: 10234 - DNA, 21 bp, synthetic construct
  misc_feature 1..21: note = Synthetic
  source 1..21: mol_type = other DNA
aattcgtcagggcgacaggtg

SEQ ID NO: 10235 - DNA, 21 bp, synthetic construct
  misc_feature 1..21: note = Synthetic
  source 1..21: mol_type = other DNA
aattgatcacagtaagacatt

SEQ ID NO: 10236 - DNA, 21 bp, synthetic construct
  misc_feature 1..21: note = Synthetic
  source 1..21: mol_type = other DNA
aattgccaatcccttgtgaca

SEQ ID NO: 10237 - DNA, 21 bp, synthetic construct
  misc_feature 1..21: note = Synthetic
  source 1..21: mol_type = other DNA
aatttaattgatcacagtaag

SEQ ID NO: 10238 - DNA, 21 bp, synthetic construct
  misc_feature 1..21: note = Synthetic
  source 1..21: mol_type = other DNA
aatttccagccccagggcccc

SEQ ID NO: 10239 - DNA, 21 bp, synthetic construct
  misc_feature 1..21: note = Synthetic
  source 1..21: mol_type = other DNA
aattttttgtatttttagtag

SEQ ID NO: 10240 - DNA, 21 bp, synthetic construct
  misc_feature 1..21: note = Synthetic
  source 1..21: mol_type = other DNA
acaaaaaatccccactatctg

SEQ ID NO: 10241 - DNA, 21 bp, synthetic construct
  misc_feature 1..21: note = Synthetic
  source 1..21: mol_type = other DNA
acaaaaaccttctatacagtg

SEQ ID NO: 10242 - DNA, 21 bp, synthetic construct
  misc_feature 1..21: note = Synthetic
  source 1..21: mol_type = other DNA
acaaacccacctcgaaagaca

SEQ ID NO: 10243 - DNA, 21 bp, synthetic construct
  misc_feature 1..21: note = Synthetic
  source 1..21: mol_type = other DNA
acaaagctctggcaggcaatg

SEQ ID NO: 10244 - DNA, 21 bp, synthetic construct
  misc_feature 1..21: note = Synthetic
  source 1..21: mol_type = other DNA
acaaagtgcaaacataacaaa

SEQ ID NO: 10245 - DNA, 21 bp, synthetic construct
  misc_feature 1..21: note = Synthetic
  source 1..21: mol_type = other DNA
acaaatacagcaaccagggtt

SEQ ID NO: 10246 - DNA, 21 bp, synthetic construct
  misc_feature 1..21: note = Synthetic
  source 1..21: mol_type = other DNA
acaaatgccaaatgtacacag

SEQ ID NO: 10247 - DNA, 21 bp, synthetic construct
  misc_feature 1..21: note = Synthetic
  source 1..21: mol_type = other DNA
acaacggggacatcattctcc

SEQ ID NO: 10248 - DNA, 21 bp, synthetic construct
  misc_feature 1..21: note = Synthetic
  source 1..21: mol_type = other DNA
acaactctgaactgagaaagt

SEQ ID NO: 10249 - DNA, 21 bp, synthetic construct
  misc_feature 1..21: note = Synthetic
  source 1..21: mol_type = other DNA
acaagattggggaagtgaatg

SEQ ID NO: 10250 - DNA, 21 bp, synthetic construct
  misc_feature 1..21: note = Synthetic
  source 1..21: mol_type = other DNA
acaagcacgtctcctgggact

SEQ ID NO: 10251 - DNA, 21 bp, synthetic construct
  misc_feature 1..21: note = Synthetic
  source 1..21: mol_type = other DNA
acaaggccggcgaggtctcag

SEQ ID NO: 10252 - DNA, 21 bp, synthetic construct
  misc_feature 1..21: note = Synthetic
  source 1..21: mol_type = other DNA
acaaggtggggacggaggtgt

SEQ ID NO: 10253 - DNA, 21 bp, synthetic construct
  misc_feature 1..21: note = Synthetic
  source 1..21: mol_type = other DNA
acaagttgacatcggaacctg

SEQ ID NO: 10254 - DNA, 21 bp, synthetic construct
  misc_feature 1..21: note = Synthetic
  source 1..21: mol_type = other DNA
acaatggacagagccctcacg

SEQ ID NO: 10255 - DNA, 21 bp, synthetic construct
  misc_feature 1..21: note = Synthetic
  source 1..21: mol_type = other DNA
acaatggcagttctcgatatt

SEQ ID NO: 10256 - DNA, 21 bp, synthetic construct
  misc_feature 1..21: note = Synthetic
  source 1..21: mol_type = other DNA
acaattgccaatcccttgtga

SEQ ID NO: 10257 - DNA, 21 bp, synthetic construct
  misc_feature 1..21: note = Synthetic
  source 1..21: mol_type = other DNA
acacaaatgccaaatgtacac

SEQ ID NO: 10258 - DNA, 21 bp, synthetic construct
  misc_feature 1..21: note = Synthetic
  source 1..21: mol_type = other DNA
acacacacgacagaaaacagt

SEQ ID NO: 10259 - DNA, 21 bp, synthetic construct
  misc_feature 1..21: note = Synthetic
  source 1..21: mol_type = other DNA
acacacgacagaaaacagtgc

SEQ ID NO: 10260 - DNA, 21 bp, synthetic construct
  misc_feature 1..21: note = Synthetic
  source 1..21: mol_type = other DNA
acacagctgcccccgagacca

SEQ ID NO: 10261 - DNA, 21 bp, synthetic construct
  misc_feature 1..21: note = Synthetic
  source 1..21: mol_type = other DNA
acacagggccccgagaatagt

SEQ ID NO: 10262 - DNA, 21 bp, synthetic construct
  misc_feature 1..21: note = Synthetic
  source 1..21: mol_type = other DNA
acacagtccagttcgtgcaaa

SEQ ID NO: 10263 - DNA, 21 bp, synthetic construct
  misc_feature 1..21: note = Synthetic
  source 1..21: mol_type = other DNA
acacagtgtacaactctgaac

SEQ ID NO: 10264 - DNA, 21 bp, synthetic construct
  misc_feature 1..21: note = Synthetic
  source 1..21: mol_type = other DNA
acacagtgttttgtccctggg

SEQ ID NO: 10265 - DNA, 21 bp, synthetic construct
  misc_feature 1..21: note = Synthetic
  source 1..21: mol_type = other DNA
acacatacccatcaacgacaa

SEQ ID NO: 10266 - DNA, 21 bp, synthetic construct
  misc_feature 1..21: note = Synthetic
  source 1..21: mol_type = other DNA
acaccagttcactcctcttgg

SEQ ID NO: 10267 - DNA, 21 bp, synthetic construct
  misc_feature 1..21: note = Synthetic
  source 1..21: mol_type = other DNA
acaccattcaggccccctttc

SEQ ID NO: 10268 - DNA, 21 bp, synthetic construct
  misc_feature 1..21: note = Synthetic
  source 1..21: mol_type = other DNA
acaccattctcctgcctcagc

SEQ ID NO: 10269 - DNA, 21 bp, synthetic construct
  misc_feature 1..21: note = Synthetic
  source 1..21: mol_type = other DNA
acacccatctcccagaagcca

SEQ ID NO: 10270 - DNA, 21 bp, synthetic construct
  misc_feature 1..21: note = Synthetic
  source 1..21: mol_type = other DNA
acacctgggtgcaggccacgt

SEQ ID NO: 10271 - DNA, 21 bp, synthetic construct
  misc_feature 1..21: note = Synthetic
  source 1..21: mol_type = other DNA
acacgacagaaaacagtgcaa

SEQ ID NO: 10272 - DNA, 21 bp, synthetic construct
  misc_feature 1..21: note = Synthetic
  source 1..21: mol_type = other DNA
acacggcccccacagctgaag

SEQ ID NO: 10273 - DNA, 21 bp, synthetic construct
  misc_feature 1..21: note = Synthetic
  source 1..21: mol_type = other DNA
acacggcgatttcagaaagaa

SEQ ID NO: 10274 - DNA, 21 bp, synthetic construct
  misc_feature 1..21: note = Synthetic
  source 1..21: mol_type = other DNA
acacgggctttccctggcctg

SEQ ID NO: 10275 - DNA, 21 bp, synthetic construct
  misc_feature 1..21: note = Synthetic
  source 1..21: mol_type = other DNA
acacgtaaagacccctacagc

SEQ ID NO: 10276 - DNA, 21 bp, synthetic construct
  misc_feature 1..21: note = Synthetic
  source 1..21: mol_type = other DNA
acacgttgactcctgagttta

SEQ ID NO: 10277 - DNA, 21 bp, synthetic construct
  misc_feature 1..21: note = Synthetic
  source 1..21: mol_type = other DNA
acactcatcgatatcgcactc

SEQ ID NO: 10278 - DNA, 21 bp, synthetic construct
  misc_feature 1..21: note = Synthetic
  source 1..21: mol_type = other DNA
acactcatcgatatcttcgca

SEQ ID NO: 10279 - DNA, 21 bp, synthetic construct
  misc_feature 1..21: note = Synthetic
  source 1..21: mol_type = other DNA
acactgccggctgccatggat

SEQ ID NO: 10280 - DNA, 21 bp, synthetic construct
  misc_feature 1..21: note = Synthetic
  source 1..21: mol_type = other DNA
acactggcacttgtagccacc

SEQ ID NO: 10281 - DNA, 21 bp, synthetic construct
  misc_feature 1..21: note = Synthetic
  source 1..21: mol_type = other DNA
acactgggtgggtcatgattc

SEQ ID NO: 10282 - DNA, 21 bp, synthetic construct
  misc_feature 1..21: note = Synthetic
  source 1..21: mol_type = other DNA
acacttgaacttgttgggtcc

SEQ ID NO: 10283 - DNA, 21 bp, synthetic construct
  misc_feature 1..21: note = Synthetic
  source 1..21: mol_type = other DNA
acagaaaacagtgcaaaataa

SEQ ID NO: 10284 - DNA, 21 bp, synthetic construct
  misc_feature 1..21: note = Synthetic
  source 1..21: mol_type = other DNA
acagacaagcacgtctcctgg

SEQ ID NO: 10285 - DNA, 21 bp, synthetic construct
  misc_feature 1..21: note = Synthetic
  source 1..21: mol_type = other DNA
acagacgaactgccgagagat

SEQ ID NO: 10286 - DNA, 21 bp, synthetic construct
  misc_feature 1..21: note = Synthetic
  source 1..21: mol_type = other DNA
acagagacagtgcccaggaca

SEQ ID NO: 10287 - DNA, 21 bp, synthetic construct
  misc_feature 1..21: note = Synthetic
  source 1..21: mol_type = other DNA
acagagcacagcggaaaccgg

SEQ ID NO: 10288 - DNA, 21 bp, synthetic construct
  misc_feature 1..21: note = Synthetic
  source 1..21: mol_type = other DNA
acagagccctcacgctactgg

SEQ ID NO: 10289 - DNA, 21 bp, synthetic construct
  misc_feature 1..21: note = Synthetic
  source 1..21: mol_type = other DNA
acagagtcggtccagtagatg

SEQ ID NO: 10290 - DNA, 21 bp, synthetic construct
  misc_feature 1..21: note = Synthetic
  source 1..21: mol_type = other DNA
acagatactggcagccgccat

SEQ ID NO: 10291 - DNA, 21 bp, synthetic construct
  misc_feature 1..21: note = Synthetic
  source 1..21: mol_type = other DNA
acagcaaccagggtttgcaaa

SEQ ID NO: 10292 - DNA, 21 bp, synthetic construct
  misc_feature 1..21: note = Synthetic
  source 1..21: mol_type = other DNA
acagccacacctgggtgcagg

SEQ ID NO: 10293 - DNA, 21 bp, synthetic construct
  misc_feature 1..21: note = Synthetic
  source 1..21: mol_type = other DNA
acagccagcccgtcgggggcc

SEQ ID NO: 10294 - DNA, 21 bp, synthetic construct
  misc_feature 1..21: note = Synthetic
  source 1..21: mol_type = other DNA
acagccgccgttgttgtccaa

SEQ ID NO: 10295 - DNA, 21 bp, synthetic construct
  misc_feature 1..21: note = Synthetic
  source 1..21: mol_type = other DNA
acagcctcaaatgcctgagct

SEQ ID NO: 10296 - DNA, 21 bp, synthetic construct
  misc_feature 1..21: note = Synthetic
  source 1..21: mol_type = other DNA
acagccttgcaggccttcgtg

SEQ ID NO: 10297 - DNA, 21 bp, synthetic construct
  misc_feature 1..21: note = Synthetic
  source 1..21: mol_type = other DNA
acagccttgctcgtctgagcc

SEQ ID NO: 10298 - DNA, 21 bp, synthetic construct
  misc_feature 1..21: note = Synthetic
  source 1..21: mol_type = other DNA
acagcgcagttttcctcgtca

SEQ ID NO: 10299 - DNA, 21 bp, synthetic construct
  misc_feature 1..21: note = Synthetic
  source 1..21: mol_type = other DNA
acagcgccagctggagtggat

SEQ ID NO: 10300 - DNA, 21 bp, synthetic construct
  misc_feature 1..21: note = Synthetic
  source 1..21: mol_type = other DNA
acagcgctgcggccactcatc

SEQ ID NO: 10301 - DNA, 21 bp, synthetic construct
  misc_feature 1..21: note = Synthetic
  source 1..21: mol_type = other DNA
acagcggaaaccggggacttc

SEQ ID NO: 10302 - DNA, 21 bp, synthetic construct
  misc_feature 1..21: note = Synthetic
  source 1..21: mol_type = other DNA
acagctgaagtccccggattt

SEQ ID NO: 10303 - DNA, 21 bp, synthetic construct
  misc_feature 1..21: note = Synthetic
  source 1..21: mol_type = other DNA
acagctgcccccgagaccaga

SEQ ID NO: 10304 - DNA, 21 bp, synthetic construct
  misc_feature 1..21: note = Synthetic
  source 1..21: mol_type = other DNA
acagctgggggatgcaggtgg

SEQ ID NO: 10305 - DNA, 21 bp, synthetic construct
  misc_feature 1..21: note = Synthetic
  source 1..21: mol_type = other DNA
acaggaaccgcggaggaacgc

SEQ ID NO: 10306 - DNA, 21 bp, synthetic construct
  misc_feature 1..21: note = Synthetic
  source 1..21: mol_type = other DNA
acaggacagccttgctcgtct

SEQ ID NO: 10307 - DNA, 21 bp, synthetic construct
  misc_feature 1..21: note = Synthetic
  source 1..21: mol_type = other DNA
acaggatccaccacgatggcc

SEQ ID NO: 10308 - DNA, 21 bp, synthetic construct
  misc_feature 1..21: note = Synthetic
  source 1..21: mol_type = other DNA
acaggcacgtgccaccgtacc

SEQ ID NO: 10309 - DNA, 21 bp, synthetic construct
  misc_feature 1..21: note = Synthetic
  source 1..21: mol_type = other DNA
acaggcactcgtagccgatct

SEQ ID NO: 10310 - DNA, 21 bp, synthetic construct
  misc_feature 1..21: note = Synthetic
  source 1..21: mol_type = other DNA
acaggcgtgagccactgcgcc

SEQ ID NO: 10311 - DNA, 21 bp, synthetic construct
  misc_feature 1..21: note = Synthetic
  source 1..21: mol_type = other DNA
acaggcgtgaggcacctgtgt

SEQ ID NO: 10312 - DNA, 21 bp, synthetic construct
  misc_feature 1..21: note = Synthetic
  source 1..21: mol_type = other DNA
acagggacgcatttacgtgct

SEQ ID NO: 10313 - DNA, 21 bp, synthetic construct
  misc_feature 1..21: note = Synthetic
  source 1..21: mol_type = other DNA
acagggcaaaggctaacctgg

SEQ ID NO: 10314 - DNA, 21 bp, synthetic construct
  misc_feature 1..21: note = Synthetic
  source 1..21: mol_type = other DNA
acagggccccgagaatagtca

SEQ ID NO: 10315 - DNA, 21 bp, synthetic construct
  misc_feature 1..21: note = Synthetic
  source 1..21: mol_type = other DNA
acaggtcagaccagtagattc

SEQ ID NO: 10316 - DNA, 21 bp, synthetic construct
  misc_feature 1..21: note = Synthetic
  source 1..21: mol_type = other DNA
acaggtcgggtggttgtgtgc

SEQ ID NO: 10317 - DNA, 21 bp, synthetic construct
  misc_feature 1..21: note = Synthetic
  source 1..21: mol_type = other DNA
acaggtgagcaccgggcagga

SEQ ID NO: 10318 - DNA, 21 bp, synthetic construct
  misc_feature 1..21: note = Synthetic
  source 1..21: mol_type = other DNA
acaggtgcccgccaccacgcc

SEQ ID NO: 10319 - DNA, 21 bp, synthetic construct
  misc_feature 1..21: note = Synthetic
  source 1..21: mol_type = other DNA
acaggtggccacagcgcagtt

SEQ ID NO: 10320 - DNA, 21 bp, synthetic construct
  misc_feature 1..21: note = Synthetic
  source 1..21: mol_type = other DNA
acaggtggccacaggacagcc

SEQ ID NO: 10321 - DNA, 21 bp, synthetic construct
  misc_feature 1..21: note = Synthetic
  source 1..21: mol_type = other DNA
acagtaacacggcgatttcag

SEQ ID NO: 10322 - DNA, 21 bp, synthetic construct
  misc_feature 1..21: note = Synthetic
  source 1..21: mol_type = other DNA
acagtaagacattcaggctac

SEQ ID NO: 10323 - DNA, 21 bp, synthetic construct
  misc_feature 1..21: note = Synthetic
  source 1..21: mol_type = other DNA
acagtaggttttcagccaaca

SEQ ID NO: 10324 - DNA, 21 bp, synthetic construct
  misc_feature 1..21: note = Synthetic
  source 1..21: mol_type = other DNA
acagtccagttcgtgcaaata

SEQ ID NO: 10325 - DNA, 21 bp, synthetic construct
  misc_feature 1..21: note = Synthetic
  source 1..21: mol_type = other DNA
acagtgcaaaataataacaca

SEQ ID NO: 10326 - DNA, 21 bp, synthetic construct
  misc_feature 1..21: note = Synthetic
  source 1..21: mol_type = other DNA
acagtgcccaggacagagtcg

SEQ ID NO: 10327 - DNA, 21 bp, synthetic construct
  misc_feature 1..21: note = Synthetic
  source 1..21: mol_type = other DNA
acagtggtttaaaaagtgaca

SEQ ID NO: 10328 - DNA, 21 bp, synthetic construct
  misc_feature 1..21: note = Synthetic
  source 1..21: mol_type = other DNA
acagtgtacaactctgaactg

SEQ ID NO: 10329 - DNA, 21 bp, synthetic construct
  misc_feature 1..21: note = Synthetic
  source 1..21: mol_type = other DNA
acagtgttttgtccctgggga

SEQ ID NO: 10330 - DNA, 21 bp, synthetic construct
  misc_feature 1..21: note = Synthetic
  source 1..21: mol_type = other DNA
acagtttcaaccaatatacaa

SEQ ID NO: 10331 - DNA, 21 bp, synthetic construct
  misc_feature 1..21: note = Synthetic
  source 1..21: mol_type = other DNA
acataaagaagaggcatttca

SEQ ID NO: 10332 - DNA, 21 bp, synthetic construct
  misc_feature 1..21: note = Synthetic
  source 1..21: mol_type = other DNA
acataaagacgacaatggcag

SEQ ID NO: 10333 - DNA, 21 bp, synthetic construct
  misc_feature 1..21: note = Synthetic
  source 1..21: mol_type = other DNA
acataacaaaaaatccccact

SEQ ID NO: 10334 - DNA, 21 bp, synthetic construct
  misc_feature 1..21: note = Synthetic
  source 1..21: mol_type = other DNA
acatacaacggggacatcatt

SEQ ID NO: 10335 - DNA, 21 bp, synthetic construct
  misc_feature 1..21: note = Synthetic
  source 1..21: mol_type = other DNA
acatacccatcaacgacaaga

SEQ ID NO: 10336 - DNA, 21 bp, synthetic construct
  misc_feature 1..21: note = Synthetic
  source 1..21: mol_type = other DNA
acatcagtgcaacagtaacac

SEQ ID NO: 10337 - DNA, 21 bp, synthetic construct
  misc_feature 1..21: note = Synthetic
  source 1..21: mol_type = other DNA
acatcattctcccaaaaagcg

SEQ ID NO: 10338 - DNA, 21 bp, synthetic construct
  misc_feature 1..21: note = Synthetic
  source 1..21: mol_type = other DNA
acatcccctcccctttcatct

SEQ ID NO: 10339 - DNA, 21 bp, synthetic construct
  misc_feature 1..21: note = Synthetic
  source 1..21: mol_type = other DNA
acatcgatgcttgagatggag

SEQ ID NO: 10340 - DNA, 21 bp, synthetic construct
  misc_feature 1..21: note = Synthetic
  source 1..21: mol_type = other DNA
acatcggaacctgtgaggcgg

SEQ ID NO: 10341 - DNA, 21 bp, synthetic construct
  misc_feature 1..21: note = Synthetic
  source 1..21: mol_type = other DNA
acatcttcacgcgggagtctg

SEQ ID NO: 10342 - DNA, 21 bp, synthetic construct
  misc_feature 1..21: note = Synthetic
  source 1..21: mol_type = other DNA
acatgaagccatgaacaggat

SEQ ID NO: 10343 - DNA, 21 bp, synthetic construct
  misc_feature 1..21: note = Synthetic
  source 1..21: mol_type = other DNA
acattaacgcagccaacttca

SEQ ID NO: 10344 - DNA, 21 bp, synthetic construct
  misc_feature 1..21: note = Synthetic
  source 1..21: mol_type = other DNA
acattcaggctacaaaaacct

SEQ ID NO: 10345 - DNA, 21 bp, synthetic construct
  misc_feature 1..21: note = Synthetic
  source 1..21: mol_type = other DNA
acattgtcactatctccaccg

SEQ ID NO: 10346 - DNA, 21 bp, synthetic construct
  misc_feature 1..21: note = Synthetic
  source 1..21: mol_type = other DNA
accaaaatcccaacccaagcc

SEQ ID NO: 10347 - DNA, 21 bp, synthetic construct
  misc_feature 1..21: note = Synthetic
  source 1..21: mol_type = other DNA
accaaggaggggcggggagat

SEQ ID NO: 10348 - DNA, 21 bp, synthetic construct
  misc_feature 1..21: note = Synthetic
  source 1..21: mol_type = other DNA
accaatatacaaagtgcaaac

SEQ ID NO: 10349 - DNA, 21 bp, synthetic construct
  misc_feature 1..21: note = Synthetic
  source 1..21: mol_type = other DNA
accacaggtgagcaccgggca

SEQ ID NO: 10350 - DNA, 21 bp, synthetic construct
  misc_feature 1..21: note = Synthetic
  source 1..21: mol_type = other DNA
accacgatggcccttggcttg

SEQ ID NO: 10351 - DNA, 21 bp, synthetic construct
  misc_feature 1..21: note = Synthetic
  source 1..21: mol_type = other DNA
accacgcccggctaatttttt

SEQ ID NO: 10352 - DNA, 21 bp, synthetic construct
  misc_feature 1..21: note = Synthetic
  source 1..21: mol_type = other DNA
accacggattcagccagatca

SEQ ID NO: 10353 - DNA, 21 bp, synthetic construct
  misc_feature 1..21: note = Synthetic
  source 1..21: mol_type = other DNA
accacgggaatggaagtgggt

SEQ ID NO: 10354 - DNA, 21 bp, synthetic construct
  misc_feature 1..21: note = Synthetic
  source 1..21: mol_type = other DNA
accacgttcctcaggttgggg

SEQ ID NO: 10355 - DNA, 21 bp, synthetic construct
  misc_feature 1..21: note = Synthetic
  source 1..21: mol_type = other DNA
accagaaaggcttatcacggt

SEQ ID NO: 10356 - DNA, 21 bp, synthetic construct
  misc_feature 1..21: note = Synthetic
  source 1..21: mol_type = other DNA
accagagacccagctccgtgg

SEQ ID NO: 10357 - DNA, 21 bp, synthetic construct
  misc_feature 1..21: note = Synthetic
  source 1..21: mol_type = other DNA
accagcgagtagatgtccaca

SEQ ID NO: 10358 - DNA, 21 bp, synthetic construct
  misc_feature 1..21: note = Synthetic
  source 1..21: mol_type = other DNA
accagctggaagccgtcgggg

SEQ ID NO: 10359 - DNA, 21 bp, synthetic construct
  misc_feature 1..21: note = Synthetic
  source 1..21: mol_type = other DNA
accaggctggtgtcctgacag

SEQ ID NO: 10360 - DNA, 21 bp, synthetic construct
  misc_feature 1..21: note = Synthetic
  source 1..21: mol_type = other DNA
accagggtttgcaaaaataaa

SEQ ID NO: 10361 - DNA, 21 bp, synthetic construct
  misc_feature 1..21: note = Synthetic
  source 1..21: mol_type = other DNA
accagtagattctattgctgg

SEQ ID NO: 10362 - DNA, 21 bp, synthetic construct
  misc_feature 1..21: note = Synthetic
  source 1..21: mol_type = other DNA
accagtcccggcagtctctag

SEQ ID NO: 10363 - DNA, 21 bp, synthetic construct
  misc_feature 1..21: note = Synthetic
  source 1..21: mol_type = other DNA
accagtgactcaggctctgcc

SEQ ID NO: 10364 - DNA, 21 bp, synthetic construct
  misc_feature 1..21: note = Synthetic
  source 1..21: mol_type = other DNA
accagttcactcctcttggct

SEQ ID NO: 10365 - DNA, 21 bp, synthetic construct
  misc_feature 1..21: note = Synthetic
  source 1..21: mol_type = other DNA
accatatcctctggggacagt

SEQ ID NO: 10366 - DNA, 21 bp, synthetic construct
  misc_feature 1..21: note = Synthetic
  source 1..21: mol_type = other DNA
accatcacagcgccagctgga

SEQ ID NO: 10367 - DNA, 21 bp, synthetic construct
  misc_feature 1..21: note = Synthetic
  source 1..21: mol_type = other DNA
accatcctcccacctcagcct

SEQ ID NO: 10368 - DNA, 21 bp, synthetic construct
  misc_feature 1..21: note = Synthetic
  source 1..21: mol_type = other DNA
accatcgaggggtagctgtag

SEQ ID NO: 10369 - DNA, 21 bp, synthetic construct
  misc_feature 1..21: note = Synthetic
  source 1..21: mol_type = other DNA
accatctgtctcgaggggtag

SEQ ID NO: 10370 - DNA, 21 bp, synthetic construct
  misc_feature 1..21: note = Synthetic
  source 1..21: mol_type = other DNA
accatgcatggtttttttttg

SEQ ID NO: 10371 - DNA, 21 bp, synthetic construct
  misc_feature 1..21: note = Synthetic
  source 1..21: mol_type = other DNA
accattcaggccccctttctt

SEQ ID NO: 10372 - DNA, 21 bp, synthetic construct
  misc_feature 1..21: note = Synthetic
  source 1..21: mol_type = other DNA
accattctcctgcctcagcct

SEQ ID NO: 10373 - DNA, 21 bp, synthetic construct
  misc_feature 1..21: note = Synthetic
  source 1..21: mol_type = other DNA
acccaagccattgcatgggca

SEQ ID NO: 10374 - DNA, 21 bp, synthetic construct
  misc_feature 1..21: note = Synthetic
  source 1..21: mol_type = other DNA
acccacctcgaaagacactgg

SEQ ID NO: 10375 - DNA, 21 bp, synthetic construct
  misc_feature 1..21: note = Synthetic
  source 1..21: mol_type = other DNA
acccacttgtaggagatgcat

SEQ ID NO: 10376 - DNA, 21 bp, synthetic construct
  misc_feature 1..21: note = Synthetic
  source 1..21: mol_type = other DNA
acccagctccgtggcgatggg

SEQ ID NO: 10377 - DNA, 21 bp, synthetic construct
  misc_feature 1..21: note = Synthetic
  source 1..21: mol_type = other DNA
acccagctgatttttaacttt

SEQ ID NO: 10378 - DNA, 21 bp, synthetic construct
  misc_feature 1..21: note = Synthetic
  source 1..21: mol_type = other DNA
acccagtagaggcggccactg

SEQ ID NO: 10379 - DNA, 21 bp, synthetic construct
  misc_feature 1..21: note = Synthetic
  source 1..21: mol_type = other DNA
acccatcaacgacaagattgg

SEQ ID NO: 10380 - DNA, 21 bp, synthetic construct
  misc_feature 1..21: note = Synthetic
  source 1..21: mol_type = other DNA
acccatctcccagaagccact

SEQ ID NO: 10381 - DNA, 21 bp, synthetic construct
  misc_feature 1..21: note = Synthetic
  source 1..21: mol_type = other DNA
acccccaggcaaaggaagacg

SEQ ID NO: 10382 - DNA, 21 bp, synthetic construct
  misc_feature 1..21: note = Synthetic
  source 1..21: mol_type = other DNA
accccctacacagggccccga

SEQ ID NO: 10383 - DNA, 21 bp, synthetic construct
  misc_feature 1..21: note = Synthetic
  source 1..21: mol_type = other DNA
acccctacagcgctgcggcca

SEQ ID NO: 10384 - DNA, 21 bp, synthetic construct
  misc_feature 1..21: note = Synthetic
  source 1..21: mol_type = other DNA
acccgcctcggcctcccaaag

SEQ ID NO: 10385 - DNA, 21 bp, synthetic construct
  misc_feature 1..21: note = Synthetic
  source 1..21: mol_type = other DNA
acccggatcacgacctgctgt

SEQ ID NO: 10386 - DNA, 21 bp, synthetic construct
  misc_feature 1..21: note = Synthetic
  source 1..21: mol_type = other DNA
acccgggacttgtcgtcgcct

SEQ ID NO: 10387 - DNA, 21 bp, synthetic construct
  misc_feature 1..21: note = Synthetic
  source 1..21: mol_type = other DNA
accctccaggttcacgcagag

SEQ ID NO: 10388 - DNA, 21 bp, synthetic construct
  misc_feature 1..21: note = Synthetic
  source 1..21: mol_type = other DNA
accctggcttcccgcgattgc

SEQ ID NO: 10389 - DNA, 21 bp, synthetic construct
  misc_feature 1..21: note = Synthetic
  source 1..21: mol_type = other DNA
accgaggccttgagggtggcc

SEQ ID NO: 10390 - DNA, 21 bp, synthetic construct
  misc_feature 1..21: note = Synthetic
  source 1..21: mol_type = other DNA
accgcggaggaacgccaggcc

SEQ ID NO: 10391 - DNA, 21 bp, synthetic construct
  misc_feature 1..21: note = Synthetic
  source 1..21: mol_type = other DNA
accgggcaggaggcctcgtct

SEQ ID NO: 10392 - DNA, 21 bp, synthetic construct
  misc_feature 1..21: note = Synthetic
  source 1..21: mol_type = other DNA
accggggacttcgccaggagg

SEQ ID NO: 10393 - DNA, 21 bp, synthetic construct
  misc_feature 1..21: note = Synthetic
  source 1..21: mol_type = other DNA
accgggtgtctcaggcactta

SEQ ID NO: 10394 - DNA, 21 bp, synthetic construct
  misc_feature 1..21: note = Synthetic
  source 1..21: mol_type = other DNA
accgtacccagctgattttta

SEQ ID NO: 10395 - DNA, 21 bp, synthetic construct
  misc_feature 1..21: note = Synthetic
  source 1..21: mol_type = other DNA
accgtgcatgttttaaacaca

SEQ ID NO: 10396 - DNA, 21 bp, synthetic construct
  misc_feature 1..21: note = Synthetic
  source 1..21: mol_type = other DNA
accgtggtgagcccaggggtg

SEQ ID NO: 10397 - DNA, 21 bp, synthetic construct
  misc_feature 1..21: note = Synthetic
  source 1..21: mol_type = other DNA
acctcagcctcgccatgcctg

SEQ ID NO: 10398 - DNA, 21 bp, synthetic construct
  misc_feature 1..21: note = Synthetic
  source 1..21: mol_type = other DNA
acctcatcctctgtggtcttc

SEQ ID NO: 10399 - DNA, 21 bp, synthetic construct
  misc_feature 1..21: note = Synthetic
  source 1..21: mol_type = other DNA
acctcatgatccacccgcctc

SEQ ID NO: 10400 - DNA, 21 bp, synthetic construct
  misc_feature 1..21: note = Synthetic
  source 1..21: mol_type = other DNA
acctccacctcctgggctcag

SEQ ID NO: 10401 - DNA, 21 bp, synthetic construct
  misc_feature 1..21: note = Synthetic
  source 1..21: mol_type = other DNA
acctccagaactgaggaatgc

SEQ ID NO: 10402 - DNA, 21 bp, synthetic construct
  misc_feature 1..21: note = Synthetic
  source 1..21: mol_type = other DNA
acctccgtgtccagagcgacc

SEQ ID NO: 10403 - DNA, 21 bp, synthetic construct
  misc_feature 1..21: note = Synthetic
  source 1..21: mol_type = other DNA
acctcctgggctcaggcgatc

SEQ ID NO: 10404 - DNA, 21 bp, synthetic construct
  misc_feature 1..21: note = Synthetic
  source 1..21: mol_type = other DNA
acctcgaaagacactgggtgg

SEQ ID NO: 10405 - DNA, 21 bp, synthetic construct
  misc_feature 1..21: note = Synthetic
  source 1..21: mol_type = other DNA
acctcgtaaggaaccgaggcc

SEQ ID NO: 10406 - DNA, 21 bp, synthetic construct
  misc_feature 1..21: note = Synthetic
  source 1..21: mol_type = other DNA
acctcgtgccggttggtgaag

SEQ ID NO: 10407 - DNA, 21 bp, synthetic construct
  misc_feature 1..21: note = Synthetic
  source 1..21: mol_type = other DNA
acctgaagtcccgtcaaacga

SEQ ID NO: 10408 - DNA, 21 bp, synthetic construct
  misc_feature 1..21: note = Synthetic
  source 1..21: mol_type = other DNA
acctgcccctctctgtccccg

SEQ ID NO: 10409 - DNA, 21 bp, synthetic construct
  misc_feature 1..21: note = Synthetic
  source 1..21: mol_type = other DNA
acctgctgtgtcctagctgga

SEQ ID NO: 10410 - DNA, 21 bp, synthetic construct
  misc_feature 1..21: note = Synthetic
  source 1..21: mol_type = other DNA
acctggctgtctagcaaggct

SEQ ID NO: 10411 - DNA, 21 bp, synthetic construct
  misc_feature 1..21: note = Synthetic
  source 1..21: mol_type = other DNA
acctgggtgcaggccacgtgt

SEQ ID NO: 10412 - DNA, 21 bp, synthetic construct
  misc_feature 1..21: note = Synthetic
  source 1..21: mol_type = other DNA
acctgtgaggcggttggcact

SEQ ID NO: 10413 - DNA, 21 bp, synthetic construct
  misc_feature 1..21: note = Synthetic
  source 1..21: mol_type = other DNA
acctgtgtctggccaaattca

SEQ ID NO: 10414 - DNA, 21 bp, synthetic construct
  misc_feature 1..21: note = Synthetic
  source 1..21: mol_type = other DNA
accttctatacagtggtttaa

SEQ ID NO: 10415 - DNA, 21 bp, synthetic construct
  misc_feature 1..21: note = Synthetic
  source 1..21: mol_type = other DNA
acctttagcctgacggtggat

SEQ ID NO: 10416 - DNA, 21 bp, synthetic construct
  misc_feature 1..21: note = Synthetic
  source 1..21: mol_type = other DNA
acgaactgccgagagatgcac

SEQ ID NO: 10417 - DNA, 21 bp, synthetic construct
  misc_feature 1..21: note = Synthetic
  source 1..21: mol_type = other DNA
acgacaagattggggaagtga

SEQ ID NO: 10418 - DNA, 21 bp, synthetic construct
  misc_feature 1..21: note = Synthetic
  source 1..21: mol_type = other DNA
acgacaatggcagttctcgat

SEQ ID NO: 10419 - DNA, 21 bp, synthetic construct
  misc_feature 1..21: note = Synthetic
  source 1..21: mol_type = other DNA
acgacagaaaacagtgcaaaa

SEQ ID NO: 10420 - DNA, 21 bp, synthetic construct
  misc_feature 1..21: note = Synthetic
  source 1..21: mol_type = other DNA
acgacagcctcaaatgcctga

SEQ ID NO: 10421 - DNA, 21 bp, synthetic construct
  misc_feature 1..21: note = Synthetic
  source 1..21: mol_type = other DNA
acgacctgctgtgtcctagct

SEQ ID NO: 10422 - DNA, 21 bp, synthetic construct
  misc_feature 1..21: note = Synthetic
  source 1..21: mol_type = other DNA
acgaggaaaggaagaaaccaa

SEQ ID NO: 10423 - DNA, 21 bp, synthetic construct
  misc_feature 1..21: note = Synthetic
  source 1..21: mol_type = other DNA
acgaggagcacgatggggagg

SEQ ID NO: 10424 - DNA, 21 bp, synthetic construct
  misc_feature 1..21: note = Synthetic
  source 1..21: mol_type = other DNA
acgaggagcactgtagggaga

SEQ ID NO: 10425 - DNA, 21 bp, synthetic construct
  misc_feature 1..21: note = Synthetic
  source 1..21: mol_type = other DNA
acgatcacggctttgaagtcc

SEQ ID NO: 10426 - DNA, 21 bp, synthetic construct
  misc_feature 1..21: note = Synthetic
  source 1..21: mol_type = other DNA
acgatccagactggaggattt

SEQ ID NO: 10427 - DNA, 21 bp, synthetic construct
  misc_feature 1..21: note = Synthetic
  source 1..21: mol_type = other DNA
acgatggcccttggcttggag

SEQ ID NO: 10428 - DNA, 21 bp, synthetic construct
  misc_feature 1..21: note = Synthetic
  source 1..21: mol_type = other DNA
acgatggggaggacaatggac

SEQ ID NO: 10429 - DNA, 21 bp, synthetic construct
  misc_feature 1..21: note = Synthetic
  source 1..21: mol_type = other DNA
acgcagagctggctgcaggtg

SEQ ID NO: 10430 - DNA, 21 bp, synthetic construct
  misc_feature 1..21: note = Synthetic
  source 1..21: mol_type = other DNA
acgcagccaacttcatcgctc

SEQ ID NO: 10431 - DNA, 21 bp, synthetic construct
  misc_feature 1..21: note = Synthetic
  source 1..21: mol_type = other DNA
acgcatttacgtgctccgaaa

SEQ ID NO: 10432 - DNA, 21 bp, synthetic construct
  misc_feature 1..21: note = Synthetic
  source 1..21: mol_type = other DNA
acgccacgtcatcctccagac

SEQ ID NO: 10433 - DNA, 21 bp, synthetic construct
  misc_feature 1..21: note = Synthetic
  source 1..21: mol_type = other DNA
acgccatgaatccctttcctg

SEQ ID NO: 10434 - DNA, 21 bp, synthetic construct
  misc_feature 1..21: note = Synthetic
  source 1..21: mol_type = other DNA
acgcccggctaattttttgta

SEQ ID NO: 10435 - DNA, 21 bp, synthetic construct
  misc_feature 1..21: note = Synthetic
  source 1..21: mol_type = other DNA
acgcccttggtatccgcaaca

SEQ ID NO: 10436 - DNA, 21 bp, synthetic construct
  misc_feature 1..21: note = Synthetic
  source 1..21: mol_type = other DNA
acgccgtgggctctgtcaagc

SEQ ID NO: 10437 - DNA, 21 bp, synthetic construct
  misc_feature 1..21: note = Synthetic
  source 1..21: mol_type = other DNA
acgcgggagtctgacggaggc

SEQ ID NO: 10438 - DNA, 21 bp, synthetic construct
  misc_feature 1..21: note = Synthetic
  source 1..21: mol_type = other DNA
acgctactgggcttcttctca

SEQ ID NO: 10439 - DNA, 21 bp, synthetic construct
  misc_feature 1..21: note = Synthetic
  source 1..21: mol_type = other DNA
acgctctgtcacacagctgcc

SEQ ID NO: 10440 - DNA, 21 bp, synthetic construct
  misc_feature 1..21: note = Synthetic
  source 1..21: mol_type = other DNA
acggaggctgtcactgtctct

SEQ ID NO: 10441 - DNA, 21 bp, synthetic construct
  misc_feature 1..21: note = Synthetic
  source 1..21: mol_type = other DNA
acggagggcgactcgtgtatg

SEQ ID NO: 10442 - DNA, 21 bp, synthetic construct
  misc_feature 1..21: note = Synthetic
  source 1..21: mol_type = other DNA
acggaggtgtcgccacagagc

SEQ ID NO: 10443 - DNA, 21 bp, synthetic construct
  misc_feature 1..21: note = Synthetic
  source 1..21: mol_type = other DNA
acggagtctcgctctgtcgcc

SEQ ID NO: 10444 - DNA, 21 bp, synthetic construct
  misc_feature 1..21: note = Synthetic
  source 1..21: mol_type = other DNA
acggattcagccagatcattt

SEQ ID NO: 10445 - DNA, 21 bp, synthetic construct
  misc_feature 1..21: note = Synthetic
  source 1..21: mol_type = other DNA
acggccaaggagaaggggtgg

SEQ ID NO: 10446 - DNA, 21 bp, synthetic construct
  misc_feature 1..21: note = Synthetic
  source 1..21: mol_type = other DNA
acggccaaggtaaccgggtgt

SEQ ID NO: 10447 - DNA, 21 bp, synthetic construct
  misc_feature 1..21: note = Synthetic
  source 1..21: mol_type = other DNA
acggcccccacagctgaagtc

SEQ ID NO: 10448 - DNA, 21 bp, synthetic construct
  misc_feature 1..21: note = Synthetic
  source 1..21: mol_type = other DNA
acggcgatttcagaaagaacc

SEQ ID NO: 10449 - DNA, 21 bp, synthetic construct
  misc_feature 1..21: note = Synthetic
  source 1..21: mol_type = other DNA
acggctgtggagctgaccttt

SEQ ID NO: 10450 - DNA, 21 bp, synthetic construct
  misc_feature 1..21: note = Synthetic
  source 1..21: mol_type = other DNA
acggctttgaagtcccggtca

SEQ ID NO: 10451 - DNA, 21 bp, synthetic construct
  misc_feature 1..21: note = Synthetic
  source 1..21: mol_type = other DNA
acgggaatggaagtgggtagg

SEQ ID NO: 10452 - DNA, 21 bp, synthetic construct
  misc_feature 1..21: note = Synthetic
  source 1..21: mol_type = other DNA
acgggactccaggcagatgtt

SEQ ID NO: 10453 - DNA, 21 bp, synthetic construct
  misc_feature 1..21: note = Synthetic
  source 1..21: mol_type = other DNA
acgggctttccctggcctggg

SEQ ID NO: 10454 - DNA, 21 bp, synthetic construct
  misc_feature 1..21: note = Synthetic
  source 1..21: mol_type = other DNA
acggggacatcattctcccaa

SEQ ID NO: 10455 - DNA, 21 bp, synthetic construct
  misc_feature 1..21: note = Synthetic
  source 1..21: mol_type = other DNA
acggggttgtcaaagttgatg

SEQ ID NO: 10456 - DNA, 21 bp, synthetic construct
  misc_feature 1..21: note = Synthetic
  source 1..21: mol_type = other DNA
acggggtttcacgtgttagcc

SEQ ID NO: 10457 - DNA, 21 bp, synthetic construct
  misc_feature 1..21: note = Synthetic
  source 1..21: mol_type = other DNA
acggtccagcgcaatttccag

SEQ ID NO: 10458 - DNA, 21 bp, synthetic construct
  misc_feature 1..21: note = Synthetic
  source 1..21: mol_type = other DNA
acggtggagagaaactcaaaa

SEQ ID NO: 10459 - DNA, 21 bp, synthetic construct
  misc_feature 1..21: note = Synthetic
  source 1..21: mol_type = other DNA
acggtggatgtctcctgggtg

SEQ ID NO: 10460 - DNA, 21 bp, synthetic construct
  misc_feature 1..21: note = Synthetic
  source 1..21: mol_type = other DNA
acggtgtcataggaagagacg

SEQ ID NO: 10461 - DNA, 21 bp, synthetic construct
  misc_feature 1..21: note = Synthetic
  source 1..21: mol_type = other DNA
acggttccctgcactgggggg

SEQ ID NO: 10462 - DNA, 21 bp, synthetic construct
  misc_feature 1..21: note = Synthetic
  source 1..21: mol_type = other DNA
acgtaaagacccctacagcgc

SEQ ID NO: 10463 - DNA, 21 bp, synthetic construct
  misc_feature 1..21: note = Synthetic
  source 1..21: mol_type = other DNA
acgtcatcctccagactgacc

SEQ ID NO: 10464 - DNA, 21 bp, synthetic construct
  misc_feature 1..21: note = Synthetic
  source 1..21: mol_type = other DNA
acgtcgcccagagcttggtga

SEQ ID NO: 10465 - DNA, 21 bp, synthetic construct
  misc_feature 1..21: note = Synthetic
  source 1..21: mol_type = other DNA
acgtctcctgggactcatcag

SEQ ID NO: 10466 - DNA, 21 bp, synthetic construct
  misc_feature 1..21: note = Synthetic
  source 1..21: mol_type = other DNA
acgtcttgggggagcacgtct

SEQ ID NO: 10467 - DNA, 21 bp, synthetic construct
  misc_feature 1..21: note = Synthetic
  source 1..21: mol_type = other DNA
acgtcttggggggacagcctt

SEQ ID NO: 10468 - DNA, 21 bp, synthetic construct
  misc_feature 1..21: note = Synthetic
  source 1..21: mol_type = other DNA
acgtgccaccgtacccagctg

SEQ ID NO: 10469 - DNA, 21 bp, synthetic construct
  misc_feature 1..21: note = Synthetic
  source 1..21: mol_type = other DNA
acgtgctccgaaaccagaaag

SEQ ID NO: 10470 - DNA, 21 bp, synthetic construct
  misc_feature 1..21: note = Synthetic
  source 1..21: mol_type = other DNA
acgtggctgaagatctcggct

SEQ ID NO: 10471 - DNA, 21 bp, synthetic construct
  misc_feature 1..21: note = Synthetic
  source 1..21: mol_type = other DNA
acgtgggaacagccgccgttg

SEQ ID NO: 10472 - DNA, 21 bp, synthetic construct
  misc_feature 1..21: note = Synthetic
  source 1..21: mol_type = other DNA
acgtgtcctcacggccaaggt

SEQ ID NO: 10473 - DNA, 21 bp, synthetic construct
  misc_feature 1..21: note = Synthetic
  source 1..21: mol_type = other DNA
acgtgttagccaggatggtct

SEQ ID NO: 10474 - DNA, 21 bp, synthetic construct
  misc_feature 1..21: note = Synthetic
  source 1..21: mol_type = other DNA
acgttcctcaggttggggatg

SEQ ID NO: 10475 - DNA, 21 bp, synthetic construct
  misc_feature 1..21: note = Synthetic
  source 1..21: mol_type = other DNA
acgttgactcctgagtttagg

SEQ ID NO: 10476 - DNA, 21 bp, synthetic construct
  misc_feature 1..21: note = Synthetic
  source 1..21: mol_type = other DNA
acgtttcaacctcgtaaggaa

SEQ ID NO: 10477 - DNA, 21 bp, synthetic construct
  misc_feature 1..21: note = Synthetic
  source 1..21: mol_type = other DNA
acgttttcctcttcacgccct

SEQ ID NO: 10478 - DNA, 21 bp, synthetic construct
  misc_feature 1..21: note = Synthetic
  source 1..21: mol_type = other DNA
actacaggtgcccgccaccac

SEQ ID NO: 10479 - DNA, 21 bp, synthetic construct
  misc_feature 1..21: note = Synthetic
  source 1..21: mol_type = other DNA
actaggtgggcggacataaag

SEQ ID NO: 10480 - DNA, 21 bp, synthetic construct
  misc_feature 1..21: note = Synthetic
  source 1..21: mol_type = other DNA
actatctccaccgtggtgagc

SEQ ID NO: 10481 - DNA, 21 bp, synthetic construct
  misc_feature 1..21: note = Synthetic
  source 1..21: mol_type = other DNA
actatctgtacagggacgcat

SEQ ID NO: 10482 - DNA, 21 bp, synthetic construct
  misc_feature 1..21: note = Synthetic
  source 1..21: mol_type = other DNA
actatgttgcccaggctggaa

SEQ ID NO: 10483 - DNA, 21 bp, synthetic construct
  misc_feature 1..21: note = Synthetic
  source 1..21: mol_type = other DNA
actcaaaacttcctggagaga

SEQ ID NO: 10484 - DNA, 21 bp, synthetic construct
  misc_feature 1..21: note = Synthetic
  source 1..21: mol_type = other DNA
actcaagtgatccagctcagc

SEQ ID NO: 10485 - DNA, 21 bp, synthetic construct
  misc_feature 1..21: note = Synthetic
  source 1..21: mol_type = other DNA
actcagcgctgccatcgcaga

SEQ ID NO: 10486 - DNA, 21 bp, synthetic construct
  misc_feature 1..21: note = Synthetic
  source 1..21: mol_type = other DNA
actcaggctctgcctctggga

SEQ ID NO: 10487 - DNA, 21 bp, synthetic construct
  misc_feature 1..21: note = Synthetic
  source 1..21: mol_type = other DNA
actcatacatacaacggggac

SEQ ID NO: 10488 - DNA, 21 bp, synthetic construct
  misc_feature 1..21: note = Synthetic
  source 1..21: mol_type = other DNA
actcatcagagccatcctggc

SEQ ID NO: 10489 - DNA, 21 bp, synthetic construct
  misc_feature 1..21: note = Synthetic
  source 1..21: mol_type = other DNA
actcatccgagccatcttcgc

SEQ ID NO: 10490 - DNA, 21 bp, synthetic construct
  misc_feature 1..21: note = Synthetic
  source 1..21: mol_type = other DNA
actcatcgatatcgcactctt

SEQ ID NO: 10491 - DNA, 21 bp, synthetic construct
  misc_feature 1..21: note = Synthetic
  source 1..21: mol_type = other DNA
actcatcgatatcttcgcatc

SEQ ID NO: 10492 - DNA, 21 bp, synthetic construct
  misc_feature 1..21: note = Synthetic
  source 1..21: mol_type = other DNA
actccaggcagatgttcacgc

SEQ ID NO: 10493 - DNA, 21 bp, synthetic construct
  misc_feature 1..21: note = Synthetic
  source 1..21: mol_type = other DNA
actcctcttggctgggtgagg

SEQ ID NO: 10494 - DNA, 21 bp, synthetic construct
  misc_feature 1..21: note = Synthetic
  source 1..21: mol_type = other DNA
actcctgaactcaagtgatcc

SEQ ID NO: 10495 - DNA, 21 bp, synthetic construct
  misc_feature 1..21: note = Synthetic
  source 1..21: mol_type = other DNA
actcctgagtttaggggtttg

SEQ ID NO: 10496 - DNA, 21 bp, synthetic construct
  misc_feature 1..21: note = Synthetic
  source 1..21: mol_type = other DNA
actcgaaggccgagcaggggc

SEQ ID NO: 10497 - DNA, 21 bp, synthetic construct
  misc_feature 1..21: note = Synthetic
  source 1..21: mol_type = other DNA
actcgccacttaggcagtgga

SEQ ID NO: 10498 - DNA, 21 bp, synthetic construct
  misc_feature 1..21: note = Synthetic
  source 1..21: mol_type = other DNA
actcgctccggtccagcgtca

SEQ ID NO: 10499 - DNA, 21 bp, synthetic construct
  misc_feature 1..21: note = Synthetic
  source 1..21: mol_type = other DNA
actcgtagccgatcttaaggt

SEQ ID NO: 10500 - DNA, 21 bp, synthetic construct
  misc_feature 1..21: note = Synthetic
  source 1..21: mol_type = other DNA
actcgtcctgggagcacgtct

SEQ ID NO: 10501 - DNA, 21 bp, synthetic construct
  misc_feature 1..21: note = Synthetic
  source 1..21: mol_type = other DNA
actcgtgtatgtcgcggaggc

SEQ ID NO: 10502 - DNA, 21 bp, synthetic construct
  misc_feature 1..21: note = Synthetic
  source 1..21: mol_type = other DNA
actcgtttctttcgcatctgt

SEQ ID NO: 10503 - DNA, 21 bp, synthetic construct
  misc_feature 1..21: note = Synthetic
  source 1..21: mol_type = other DNA
actctgaactgagaaagtgca

SEQ ID NO: 10504 - DNA, 21 bp, synthetic construct
  misc_feature 1..21: note = Synthetic
  source 1..21: mol_type = other DNA
actctttgatgggttcatctg

SEQ ID NO: 10505 - DNA, 21 bp, synthetic construct
  misc_feature 1..21: note = Synthetic
  source 1..21: mol_type = other DNA
actgaaaatggcttcgttgat

SEQ ID NO: 10506 - DNA, 21 bp, synthetic construct
  misc_feature 1..21: note = Synthetic
  source 1..21: mol_type = other DNA
actgaacaaatacagcaacca

SEQ ID NO: 10507 - DNA, 21 bp, synthetic construct
  misc_feature 1..21: note = Synthetic
  source 1..21: mol_type = other DNA
actgaatgttttcagtcacca

SEQ ID NO: 10508 - DNA, 21 bp, synthetic construct
  misc_feature 1..21: note = Synthetic
  source 1..21: mol_type = other DNA
actgaccatcgaggggtagct

SEQ ID NO: 10509 - DNA, 21 bp, synthetic construct
  misc_feature 1..21: note = Synthetic
  source 1..21: mol_type = other DNA
actgaccatctgtctcgaggg

SEQ ID NO: 10510 - DNA, 21 bp, synthetic construct
  misc_feature 1..21: note = Synthetic
  source 1..21: mol_type = other DNA
actgagaaagtgcaaggagac

SEQ ID NO: 10511 - DNA, 21 bp, synthetic construct
  misc_feature 1..21: note = Synthetic
  source 1..21: mol_type = other DNA
actgaggaatgcagcggttga

SEQ ID NO: 10512 - DNA, 21 bp, synthetic construct
  misc_feature 1..21: note = Synthetic
  source 1..21: mol_type = other DNA
actgaggagatctagggtgat

SEQ ID NO: 10513 - DNA, 21 bp, synthetic construct
  misc_feature 1..21: note = Synthetic
  source 1..21: mol_type = other DNA
actgcaacctccacctcctgg

SEQ ID NO: 10514 - DNA, 21 bp, synthetic construct
  misc_feature 1..21: note = Synthetic
  source 1..21: mol_type = other DNA
actgcaagctccgcttcccgg

SEQ ID NO: 10515 - DNA, 21 bp, synthetic construct
  misc_feature 1..21: note = Synthetic
  source 1..21: mol_type = other DNA
actgcagcctcagcctctctt

SEQ ID NO: 10516 - DNA, 21 bp, synthetic construct
  misc_feature 1..21: note = Synthetic
  source 1..21: mol_type = other DNA
actgcagcctcagcctctgtg

SEQ ID NO: 10517 - DNA, 21 bp, synthetic construct
  misc_feature 1..21: note = Synthetic
  source 1..21: mol_type = other DNA
actgcagtccccgccgcggcg

SEQ ID NO: 10518 - DNA, 21 bp, synthetic construct
  misc_feature 1..21: note = Synthetic
  source 1..21: mol_type = other DNA
actgcagtggcgcaatctcgg

SEQ ID NO: 10519 - DNA, 21 bp, synthetic construct
  misc_feature 1..21: note = Synthetic
  source 1..21: mol_type = other DNA
actgccgagagatgcacttcc

SEQ ID NO: 10520 - DNA, 21 bp, synthetic construct
  misc_feature 1..21: note = Synthetic
  source 1..21: mol_type = other DNA
actgccggctgccatggatgc

SEQ ID NO: 10521 - DNA, 21 bp, synthetic construct
  misc_feature 1..21: note = Synthetic
  source 1..21: mol_type = other DNA
actgcgcccggcctcaccgtg

SEQ ID NO: 10522 - DNA, 21 bp, synthetic construct
  misc_feature 1..21: note = Synthetic
  source 1..21: mol_type = other DNA
actgcggactgcagtggcgca

SEQ ID NO: 10523 - DNA, 21 bp, synthetic construct
  misc_feature 1..21: note = Synthetic
  source 1..21: mol_type = other DNA
actggaactcgtttctttcgc

SEQ ID NO: 10524 - DNA, 21 bp, synthetic construct
  misc_feature 1..21: note = Synthetic
  source 1..21: mol_type = other DNA
actggaagctggcgggaccac

SEQ ID NO: 10525 - DNA, 21 bp, synthetic construct
  misc_feature 1..21: note = Synthetic
  source 1..21: mol_type = other DNA
actggaattcgtcagggcgac

SEQ ID NO: 10526 - DNA, 21 bp, synthetic construct
  misc_feature 1..21: note = Synthetic
  source 1..21: mol_type = other DNA
actggaggatttatttatttt

SEQ ID NO: 10527 - DNA, 21 bp, synthetic construct
  misc_feature 1..21: note = Synthetic
  source 1..21: mol_type = other DNA
actggcacttgtagccaccct

SEQ ID NO: 10528 - DNA, 21 bp, synthetic construct
  misc_feature 1..21: note = Synthetic
  source 1..21: mol_type = other DNA
actggcagccgccattgctca

SEQ ID NO: 10529 - DNA, 21 bp, synthetic construct
  misc_feature 1..21: note = Synthetic
  source 1..21: mol_type = other DNA
actgggcttcttctcatttcc

SEQ ID NO: 10530 - DNA, 21 bp, synthetic construct
  misc_feature 1..21: note = Synthetic
  source 1..21: mol_type = other DNA
actgggggggacacagtgttt

SEQ ID NO: 10531 - DNA, 21 bp, synthetic construct
  misc_feature 1..21: note = Synthetic
  source 1..21: mol_type = other DNA
actgggtgggtcatgattcgg

SEQ ID NO: 10532 - DNA, 21 bp, synthetic construct
  misc_feature 1..21: note = Synthetic
  source 1..21: mol_type = other DNA
actgtagggagaggcacgctc

SEQ ID NO: 10533 - DNA, 21 bp, synthetic construct
  misc_feature 1..21: note = Synthetic
  source 1..21: mol_type = other DNA
actgtccccttggaacacgta

SEQ ID NO: 10534 - DNA, 21 bp, synthetic construct
  misc_feature 1..21: note = Synthetic
  source 1..21: mol_type = other DNA
actgtccgaagcctgttctgc

SEQ ID NO: 10535 - DNA, 21 bp, synthetic construct
  misc_feature 1..21: note = Synthetic
  source 1..21: mol_type = other DNA
actgtctctccggacatcagt

SEQ ID NO: 10536 - DNA, 21 bp, synthetic construct
  misc_feature 1..21: note = Synthetic
  source 1..21: mol_type = other DNA
acttaataaatattaagggtg

SEQ ID NO: 10537 - DNA, 21 bp, synthetic construct
  misc_feature 1..21: note = Synthetic
  source 1..21: mol_type = other DNA
acttaggcagtggaactcgaa

SEQ ID NO: 10538 - DNA, 21 bp, synthetic construct
  misc_feature 1..21: note = Synthetic
  source 1..21: mol_type = other DNA
acttcatcgctcatgtccttg

SEQ ID NO: 10539 - DNA, 21 bp, synthetic construct
  misc_feature 1..21: note = Synthetic
  source 1..21: mol_type = other DNA
acttcccatcgtggcagcgaa

SEQ ID NO: 10540 - DNA, 21 bp, synthetic construct
  misc_feature 1..21: note = Synthetic
  source 1..21: mol_type = other DNA
acttcctggagagaaatggag

SEQ ID NO: 10541 - DNA, 21 bp, synthetic construct
  misc_feature 1..21: note = Synthetic
  source 1..21: mol_type = other DNA
acttcgccaggagggcccagg

SEQ ID NO: 10542 - DNA, 21 bp, synthetic construct
  misc_feature 1..21: note = Synthetic
  source 1..21: mol_type = other DNA
acttgaacttgttgggtccct

SEQ ID NO: 10543 - DNA, 21 bp, synthetic construct
  misc_feature 1..21: note = Synthetic
  source 1..21: mol_type = other DNA
acttgatcggggctggtgggg

SEQ ID NO: 10544 - DNA, 21 bp, synthetic construct
  misc_feature 1..21: note = Synthetic
  source 1..21: mol_type = other DNA
acttgcttctctgggcctgac

SEQ ID NO: 10545 - DNA, 21 bp, synthetic construct
  misc_feature 1..21: note = Synthetic
  source 1..21: mol_type = other DNA
acttggccatcgcacctccag

SEQ ID NO: 10546 - DNA, 21 bp, synthetic construct
  misc_feature 1..21: note = Synthetic
  source 1..21: mol_type = other DNA
acttgggcgagtgggggttga

SEQ ID NO: 10547 - DNA, 21 bp, synthetic construct
  misc_feature 1..21: note = Synthetic
  source 1..21: mol_type = other DNA
acttgtagccaccctccaggt

SEQ ID NO: 10548 - DNA, 21 bp, synthetic construct
  misc_feature 1..21: note = Synthetic
  source 1..21: mol_type = other DNA
acttgtaggagatgcatttcc

SEQ ID NO: 10549 - DNA, 21 bp, synthetic construct
  misc_feature 1..21: note = Synthetic
  source 1..21: mol_type = other DNA
acttgtcgtcgcctttgtgac

SEQ ID NO: 10550 - DNA, 21 bp, synthetic construct
  misc_feature 1..21: note = Synthetic
  source 1..21: mol_type = other DNA
acttgttgggtccctcgcaga

SEQ ID NO: 10551 - DNA, 21 bp, synthetic construct
  misc_feature 1..21: note = Synthetic
  source 1..21: mol_type = other DNA
actttgtccagggtgatgcat

SEQ ID NO: 10552 - DNA, 21 bp, synthetic construct
  misc_feature 1..21: note = Synthetic
  source 1..21: mol_type = other DNA
actttgtcctcaaagacggcc

SEQ ID NO: 10553 - DNA, 21 bp, synthetic construct
  misc_feature 1..21: note = Synthetic
  source 1..21: mol_type = other DNA
actttttggtttttgtagaga

SEQ ID NO: 10554 - DNA, 21 bp, synthetic construct
  misc_feature 1..21: note = Synthetic
  source 1..21: mol_type = other DNA
agaaaacagtgcaaaataata

SEQ ID NO: 10555 - DNA, 21 bp, synthetic construct
  misc_feature 1..21: note = Synthetic
  source 1..21: mol_type = other DNA
agaaaccaaaatcccaaccca

SEQ ID NO: 10556 - DNA, 21 bp, synthetic construct
  misc_feature 1..21: note = Synthetic
  source 1..21: mol_type = other DNA
agaaactcaaaacttcctgga

SEQ ID NO: 10557 - DNA, 21 bp, synthetic construct
  misc_feature 1..21: note = Synthetic
  source 1..21: mol_type = other DNA
agaaagaacctgaagtcccgt

SEQ ID NO: 10558 - DNA, 21 bp, synthetic construct
  misc_feature 1..21: note = Synthetic
  source 1..21: mol_type = other DNA
agaaaggcttatcacggttcc

SEQ ID NO: 10559 - DNA, 21 bp, synthetic construct
  misc_feature 1..21: note = Synthetic
  source 1..21: mol_type = other DNA
agaaagtgcaaggagaccacg

SEQ ID NO: 10560 - DNA, 21 bp, synthetic construct
  misc_feature 1..21: note = Synthetic
  source 1..21: mol_type = other DNA
agaaatggaggtgtcatcctg

SEQ ID NO: 10561 - DNA, 21 bp, synthetic construct
  misc_feature 1..21: note = Synthetic
  source 1..21: mol_type = other DNA
agaaatttaattgatcacagt

SEQ ID NO: 10562 - DNA, 21 bp, synthetic construct
  misc_feature 1..21: note = Synthetic
  source 1..21: mol_type = other DNA
agaaccatatcctctggggac

SEQ ID NO: 10563 - DNA, 21 bp, synthetic construct
  misc_feature 1..21: note = Synthetic
  source 1..21: mol_type = other DNA
agaacctgaagtcccgtcaaa

SEQ ID NO: 10564 - DNA, 21 bp, synthetic construct
  misc_feature 1..21: note = Synthetic
  source 1..21: mol_type = other DNA
agaactgaggaatgcagcggt

SEQ ID NO: 10565 - DNA, 21 bp, synthetic construct
  misc_feature 1..21: note = Synthetic
  source 1..21: mol_type = other DNA
agaagaggcatttcagaggca

SEQ ID NO: 10566 - DNA, 21 bp, synthetic construct
  misc_feature 1..21: note = Synthetic
  source 1..21: mol_type = other DNA
agaagaggtaaacacgttgac

SEQ ID NO: 10567 - DNA, 21 bp, synthetic construct
  misc_feature 1..21: note = Synthetic
  source 1..21: mol_type = other DNA
agaagaggtaggcgatggagc

SEQ ID NO: 10568 - DNA, 21 bp, synthetic construct
  misc_feature 1..21: note = Synthetic
  source 1..21: mol_type = other DNA
agaagccactcatacatacaa

SEQ ID NO: 10569 - DNA, 21 bp, synthetic construct
  misc_feature 1..21: note = Synthetic
  source 1..21: mol_type = other DNA
agaaggaagacccccaggcaa

SEQ ID NO: 10570 - DNA, 21 bp, synthetic construct
  misc_feature 1..21: note = Synthetic
  source 1..21: mol_type = other DNA
agaaggggtgggccagcctct

SEQ ID NO: 10571 - DNA, 21 bp, synthetic construct
  misc_feature 1..21: note = Synthetic
  source 1..21: mol_type = other DNA
agaagtggaagcactaggtgg

SEQ ID NO: 10572 - DNA, 21 bp, synthetic construct
  misc_feature 1..21: note = Synthetic
  source 1..21: mol_type = other DNA
agaatagtcactgaacaaata

SEQ ID NO: 10573 - DNA, 21 bp, synthetic construct
  misc_feature 1..21: note = Synthetic
  source 1..21: mol_type = other DNA
agacaagcacgtctcctggga

SEQ ID NO: 10574 - DNA, 21 bp, synthetic construct
  misc_feature 1..21: note = Synthetic
  source 1..21: mol_type = other DNA
agacactgggtgggtcatgat

SEQ ID NO: 10575 - DNA, 21 bp, synthetic construct
  misc_feature 1..21: note = Synthetic
  source 1..21: mol_type = other DNA
agacagccttgctcgtctgag

SEQ ID NO: 10576 - DNA, 21 bp, synthetic construct
  misc_feature 1..21: note = Synthetic
  source 1..21: mol_type = other DNA
agacagtgcccaggacagagt

SEQ ID NO: 10577 - DNA, 21 bp, synthetic construct
  misc_feature 1..21: note = Synthetic
  source 1..21: mol_type = other DNA
agacattcaggctacaaaaac

SEQ ID NO: 10578 - DNA, 21 bp, synthetic construct
  misc_feature 1..21: note = Synthetic
  source 1..21: mol_type = other DNA
agacattgtcactatctccac

SEQ ID NO: 10579 - DNA, 21 bp, synthetic construct
  misc_feature 1..21: note = Synthetic
  source 1..21: mol_type = other DNA
agaccaaggaggggcggggag

SEQ ID NO: 10580 - DNA, 21 bp, synthetic construct
  misc_feature 1..21: note = Synthetic
  source 1..21: mol_type = other DNA
agaccacgggaatggaagtgg

SEQ ID NO: 10581 - DNA, 21 bp, synthetic construct
  misc_feature 1..21: note = Synthetic
  source 1..21: mol_type = other DNA
agaccagagacccagctccgt

SEQ ID NO: 10582 - DNA, 21 bp, synthetic construct
  misc_feature 1..21: note = Synthetic
  source 1..21: mol_type = other DNA
agaccagtagattctattgct

SEQ ID NO: 10583 - DNA, 21 bp, synthetic construct
  misc_feature 1..21: note = Synthetic
  source 1..21: mol_type = other DNA
agacccacttgtaggagatgc

SEQ ID NO: 10584 - DNA, 21 bp, synthetic construct
  misc_feature 1..21: note = Synthetic
  source 1..21: mol_type = other DNA
agacccagctccgtggcgatg

SEQ ID NO: 10585 - DNA, 21 bp, synthetic construct
  misc_feature 1..21: note = Synthetic
  source 1..21: mol_type = other DNA
agacccccaggcaaaggaaga

SEQ ID NO: 10586 - DNA, 21 bp, synthetic construct
  misc_feature 1..21: note = Synthetic
  source 1..21: mol_type = other DNA
agacccctacagcgctgcggc

SEQ ID NO: 10587 - DNA, 21 bp, synthetic construct
  misc_feature 1..21: note = Synthetic
  source 1..21: mol_type = other DNA
agacgaactgccgagagatgc

SEQ ID NO: 10588 - DNA, 21 bp, synthetic construct
  misc_feature 1..21: note = Synthetic
  source 1..21: mol_type = other DNA
agacgacaatggcagttctcg

SEQ ID NO: 10589 - DNA, 21 bp, synthetic construct
  misc_feature 1..21: note = Synthetic
  source 1..21: mol_type = other DNA
agacgaggagcacgatgggga

SEQ ID NO: 10590 - DNA, 21 bp, synthetic construct
  misc_feature 1..21: note = Synthetic
  source 1..21: mol_type = other DNA
agacgaggagcactgtaggga

SEQ ID NO: 10591 - DNA, 21 bp, synthetic construct
  misc_feature 1..21: note = Synthetic
  source 1..21: mol_type = other DNA
agacgccgtgggctctgtcaa

SEQ ID NO: 10592 - DNA, 21 bp, synthetic construct
  misc_feature 1..21: note = Synthetic
  source 1..21: mol_type = other DNA
agacggagtctcgctctgtcg

SEQ ID NO: 10593 - DNA, 21 bp, synthetic construct
  misc_feature 1..21: note = Synthetic
  source 1..21: mol_type = other DNA
agacggccaaggagaaggggt

SEQ ID NO: 10594 - DNA, 21 bp, synthetic construct
  misc_feature 1..21: note = Synthetic
  source 1..21: mol_type = other DNA
agacggggttgtcaaagttga

SEQ ID NO: 10595 - DNA, 21 bp, synthetic construct
  misc_feature 1..21: note = Synthetic
  source 1..21: mol_type = other DNA
agacggggtttcacgtgttag

SEQ ID NO: 10596 - DNA, 21 bp, synthetic construct
  misc_feature 1..21: note = Synthetic
  source 1..21: mol_type = other DNA
agacgtgggaacagccgccgt

SEQ ID NO: 10597 - DNA, 21 bp, synthetic construct
  misc_feature 1..21: note = Synthetic
  source 1..21: mol_type = other DNA
agactgaccatcgaggggtag

SEQ ID NO: 10598 - DNA, 21 bp, synthetic construct
  misc_feature 1..21: note = Synthetic
  source 1..21: mol_type = other DNA
agactgaccatctgtctcgag

SEQ ID NO: 10599 - DNA, 21 bp, synthetic construct
  misc_feature 1..21: note = Synthetic
  source 1..21: mol_type = other DNA
agactgcggactgcagtggcg

SEQ ID NO: 10600 - DNA, 21 bp, synthetic construct
  misc_feature 1..21: note = Synthetic
  source 1..21: mol_type = other DNA
agactggaggatttatttatt

SEQ ID NO: 10601 - DNA, 21 bp, synthetic construct
  misc_feature 1..21: note = Synthetic
  source 1..21: mol_type = other DNA
agactttgtccagggtgatgc

SEQ ID NO: 10602 - DNA, 21 bp, synthetic construct
  misc_feature 1..21: note = Synthetic
  source 1..21: mol_type = other DNA
agagaaactcaaaacttcctg

SEQ ID NO: 10603 - DNA, 21 bp, synthetic construct
  misc_feature 1..21: note = Synthetic
  source 1..21: mol_type = other DNA
agagaaatggaggtgtcatcc

SEQ ID NO: 10604 - DNA, 21 bp, synthetic construct
  misc_feature 1..21: note = Synthetic
  source 1..21: mol_type = other DNA
agagaaccatatcctctgggg

SEQ ID NO: 10605 - DNA, 21 bp, synthetic construct
  misc_feature 1..21: note = Synthetic
  source 1..21: mol_type = other DNA
agagacagtgcccaggacaga

SEQ ID NO: 10606 - DNA, 21 bp, synthetic construct
  misc_feature 1..21: note = Synthetic
  source 1..21: mol_type = other DNA
agagacccagctccgtggcga

SEQ ID NO: 10607 - DNA, 21 bp, synthetic construct
  misc_feature 1..21: note = Synthetic
  source 1..21: mol_type = other DNA
agagacgccgtgggctctgtc

SEQ ID NO: 10608 - DNA, 21 bp, synthetic construct
  misc_feature 1..21: note = Synthetic
  source 1..21: mol_type = other DNA
agagacggggtttcacgtgtt

SEQ ID NO: 10609 - DNA, 21 bp, synthetic construct
  misc_feature 1..21: note = Synthetic
  source 1..21: mol_type = other DNA
agagatgcacttcccatcgtg

SEQ ID NO: 10610 - DNA, 21 bp, synthetic construct
  misc_feature 1..21: note = Synthetic
  source 1..21: mol_type = other DNA
agagatgggatctcgctttgt

SEQ ID NO: 10611 - DNA, 21 bp, synthetic construct
  misc_feature 1..21: note = Synthetic
  source 1..21: mol_type = other DNA
agagatggggtcttactatgt

SEQ ID NO: 10612 - DNA, 21 bp, synthetic construct
  misc_feature 1..21: note = Synthetic
  source 1..21: mol_type = other DNA
agagattggtggatgaggcag

SEQ ID NO: 10613 - DNA, 21 bp, synthetic construct
  misc_feature 1..21: note = Synthetic
  source 1..21: mol_type = other DNA
agagcacagcggaaaccgggg

SEQ ID NO: 10614 - DNA, 21 bp, synthetic construct
  misc_feature 1..21: note = Synthetic
  source 1..21: mol_type = other DNA
agagcactggaattcgtcagg

SEQ ID NO: 10615 - DNA, 21 bp, synthetic construct
  misc_feature 1..21: note = Synthetic
  source 1..21: mol_type = other DNA
agagccatcctggcactcagc

SEQ ID NO: 10616 - DNA, 21 bp, synthetic construct
  misc_feature 1..21: note = Synthetic
  source 1..21: mol_type = other DNA
agagccctcacgctactgggc

SEQ ID NO: 10617 - DNA, 21 bp, synthetic construct
  misc_feature 1..21: note = Synthetic
  source 1..21: mol_type = other DNA
agagcgaccacgttcctcagg

SEQ ID NO: 10618 - DNA, 21 bp, synthetic construct
  misc_feature 1..21: note = Synthetic
  source 1..21: mol_type = other DNA
agagctggctgcaggtgtcgg

SEQ ID NO: 10619 - DNA, 21 bp, synthetic construct
  misc_feature 1..21: note = Synthetic
  source 1..21: mol_type = other DNA
agagcttggtgagacattgtc

SEQ ID NO: 10620 - DNA, 21 bp, synthetic construct
  misc_feature 1..21: note = Synthetic
  source 1..21: mol_type = other DNA
agaggcaataaccccctacac

SEQ ID NO: 10621 - DNA, 21 bp, synthetic construct
  misc_feature 1..21: note = Synthetic
  source 1..21: mol_type = other DNA
agaggcacgctctgtcacaca

SEQ ID NO: 10622 - DNA, 21 bp, synthetic construct
  misc_feature 1..21: note = Synthetic
  source 1..21: mol_type = other DNA
agaggcatttcagaggcaata

SEQ ID NO: 10623 - DNA, 21 bp, synthetic construct
  misc_feature 1..21: note = Synthetic
  source 1..21: mol_type = other DNA
agaggccatgggctgctgatg

SEQ ID NO: 10624 - DNA, 21 bp, synthetic construct
  misc_feature 1..21: note = Synthetic
  source 1..21: mol_type = other DNA
agaggcggccactgaggagat

SEQ ID NO: 10625 - DNA, 21 bp, synthetic construct
  misc_feature 1..21: note = Synthetic
  source 1..21: mol_type = other DNA
agaggtaaacacgttgactcc

SEQ ID NO: 10626 - DNA, 21 bp, synthetic construct
  misc_feature 1..21: note = Synthetic
  source 1..21: mol_type = other DNA
agaggtaggcgatggagccca

SEQ ID NO: 10627 - DNA, 21 bp, synthetic construct
  misc_feature 1..21: note = Synthetic
  source 1..21: mol_type = other DNA
agagtcggtccagtagatgtt

SEQ ID NO: 10628 - DNA, 21 bp, synthetic construct
  misc_feature 1..21: note = Synthetic
  source 1..21: mol_type = other DNA
agagtgtcacattaacgcagc

SEQ ID NO: 10629 - DNA, 21 bp, synthetic construct
  misc_feature 1..21: note = Synthetic
  source 1..21: mol_type = other DNA
agagtgtcagacagccttgct

SEQ ID NO: 10630 - DNA, 21 bp, synthetic construct
  misc_feature 1..21: note = Synthetic
  source 1..21: mol_type = other DNA
agatactggcagccgccattg

SEQ ID NO: 10631 - DNA, 21 bp, synthetic construct
  misc_feature 1..21: note = Synthetic
  source 1..21: mol_type = other DNA
agatcattctctgggacaggt

SEQ ID NO: 10632 - DNA, 21 bp, synthetic construct
  misc_feature 1..21: note = Synthetic
  source 1..21: mol_type = other DNA
agatcatttccgacgccatga

SEQ ID NO: 10633 - DNA, 21 bp, synthetic construct
  misc_feature 1..21: note = Synthetic
  source 1..21: mol_type = other DNA
agatctagggtgatgccattg

SEQ ID NO: 10634 - DNA, 21 bp, synthetic construct
  misc_feature 1..21: note = Synthetic
  source 1..21: mol_type = other DNA
agatctcggctgcagaccaag

SEQ ID NO: 10635 - DNA, 21 bp, synthetic construct
  misc_feature 1..21: note = Synthetic
  source 1..21: mol_type = other DNA
agatgaataaatatataaaac

SEQ ID NO: 10636 - DNA, 21 bp, synthetic construct
  misc_feature 1..21: note = Synthetic
  source 1..21: mol_type = other DNA
agatgcacttcccatcgtggc

SEQ ID NO: 10637 - DNA, 21 bp, synthetic construct
  misc_feature 1..21: note = Synthetic
  source 1..21: mol_type = other DNA
agatgcatttcccgtcttggc

SEQ ID NO: 10638 - DNA, 21 bp, synthetic construct
  misc_feature 1..21: note = Synthetic
  source 1..21: mol_type = other DNA
agatggagtgaagtttggagt

SEQ ID NO: 10639 - DNA, 21 bp, synthetic construct
  misc_feature 1..21: note = Synthetic
  source 1..21: mol_type = other DNA
agatgggatctcgctttgttg

SEQ ID NO: 10640 - DNA, 21 bp, synthetic construct
  misc_feature 1..21: note = Synthetic
  source 1..21: mol_type = other DNA
agatggggtcttactatgttg

SEQ ID NO: 10641 - DNA, 21 bp, synthetic construct
  misc_feature 1..21: note = Synthetic
  source 1..21: mol_type = other DNA
agatggtcttccggttgcccc

SEQ ID NO: 10642 - DNA, 21 bp, synthetic construct
  misc_feature 1..21: note = Synthetic
  source 1..21: mol_type = other DNA
agatgtccacaccattcaggc

SEQ ID NO: 10643 - DNA, 21 bp, synthetic construct
  misc_feature 1..21: note = Synthetic
  source 1..21: mol_type = other DNA
agatgttcacgccacgtcatc

SEQ ID NO: 10644 - DNA, 21 bp, synthetic construct
  misc_feature 1..21: note = Synthetic
  source 1..21: mol_type = other DNA
agatgttgctgtggatccagt

SEQ ID NO: 10645 - DNA, 21 bp, synthetic construct
  misc_feature 1..21: note = Synthetic
  source 1..21: mol_type = other DNA
agattctattgctggccacct

SEQ ID NO: 10646 - DNA, 21 bp, synthetic construct
  misc_feature 1..21: note = Synthetic
  source 1..21: mol_type = other DNA
agattctgaggcaacgtttca

SEQ ID NO: 10647 - DNA, 21 bp, synthetic construct
  misc_feature 1..21: note = Synthetic
  source 1..21: mol_type = other DNA
agattggggaagtgaatggct

SEQ ID NO: 10648 - DNA, 21 bp, synthetic construct
  misc_feature 1..21: note = Synthetic
  source 1..21: mol_type = other DNA
agattggtggatgaggcaggg

SEQ ID NO: 10649 - DNA, 21 bp, synthetic construct
  misc_feature 1..21: note = Synthetic
  source 1..21: mol_type = other DNA
agatttgtccttgcagtcggg

SEQ ID NO: 10650 - DNA, 21 bp, synthetic construct
  misc_feature 1..21: note = Synthetic
  source 1..21: mol_type = other DNA
agattttatatatatgtgtgt

SEQ ID NO: 10651 - DNA, 21 bp, synthetic construct
  misc_feature 1..21: note = Synthetic
  source 1..21: mol_type = other DNA
agcaaccagggtttgcaaaaa

SEQ ID NO: 10652 - DNA, 21 bp, synthetic construct
  misc_feature 1..21: note = Synthetic
  source 1..21: mol_type = other DNA
agcaacgtcgcccagagcttg

SEQ ID NO: 10653 - DNA, 21 bp, synthetic construct
  misc_feature 1..21: note = Synthetic
  source 1..21: mol_type = other DNA
agcaaggcgacggtccagcgc

SEQ ID NO: 10654 - DNA, 21 bp, synthetic construct
  misc_feature 1..21: note = Synthetic
  source 1..21: mol_type = other DNA
agcaaggcttgcatagaagag

SEQ ID NO: 10655 - DNA, 21 bp, synthetic construct
  misc_feature 1..21: note = Synthetic
  source 1..21: mol_type = other DNA
agcacagcggaaaccggggac

SEQ ID NO: 10656 - DNA, 21 bp, synthetic construct
  misc_feature 1..21: note = Synthetic
  source 1..21: mol_type = other DNA
agcaccgggcaggaggcctcg

SEQ ID NO: 10657 - DNA, 21 bp, synthetic construct
  misc_feature 1..21: note = Synthetic
  source 1..21: mol_type = other DNA
agcacgatggggaggacaatg

SEQ ID NO: 10658 - DNA, 21 bp, synthetic construct
  misc_feature 1..21: note = Synthetic
  source 1..21: mol_type = other DNA
agcacgtctcctgggactcat

SEQ ID NO: 10659 - DNA, 21 bp, synthetic construct
  misc_feature 1..21: note = Synthetic
  source 1..21: mol_type = other DNA
agcacgtcttgggggagcacg

SEQ ID NO: 10660 - DNA, 21 bp, synthetic construct
  misc_feature 1..21: note = Synthetic
  source 1..21: mol_type = other DNA
agcacgtcttggggggacagc

SEQ ID NO: 10661 - DNA, 21 bp, synthetic construct
  misc_feature 1..21: note = Synthetic
  source 1..21: mol_type = other DNA
agcactaggtgggcggacata

SEQ ID NO: 10662 - DNA, 21 bp, synthetic construct
  misc_feature 1..21: note = Synthetic
  source 1..21: mol_type = other DNA
agcactggaattcgtcagggc

SEQ ID NO: 10663 - DNA, 21 bp, synthetic construct
  misc_feature 1..21: note = Synthetic
  source 1..21: mol_type = other DNA
agcactgtagggagaggcacg

SEQ ID NO: 10664 - DNA, 21 bp, synthetic construct
  misc_feature 1..21: note = Synthetic
  source 1..21: mol_type = other DNA
agcagcatgccgtccgggcag

SEQ ID NO: 10665 - DNA, 21 bp, synthetic construct
  misc_feature 1..21: note = Synthetic
  source 1..21: mol_type = other DNA
agcaggggctactgtcccctt

SEQ ID NO: 10666 - DNA, 21 bp, synthetic construct
  misc_feature 1..21: note = Synthetic
  source 1..21: mol_type = other DNA
agcagtcccggtctgagtcac

SEQ ID NO: 10667 - DNA, 21 bp, synthetic construct
  misc_feature 1..21: note = Synthetic
  source 1..21: mol_type = other DNA
agcagtggcataatcatagct

SEQ ID NO: 10668 - DNA, 21 bp, synthetic construct
  misc_feature 1..21: note = Synthetic
  source 1..21: mol_type = other DNA
agcatgccgtccgggcaggcg

SEQ ID NO: 10669 - DNA, 21 bp, synthetic construct
  misc_feature 1..21: note = Synthetic
  source 1..21: mol_type = other DNA
agcattcgttggtcccgcact

SEQ ID NO: 10670 - DNA, 21 bp, synthetic construct
  misc_feature 1..21: note = Synthetic
  source 1..21: mol_type = other DNA
agccaacaagttgacatcgga

SEQ ID NO: 10671 - DNA, 21 bp, synthetic construct
  misc_feature 1..21: note = Synthetic
  source 1..21: mol_type = other DNA
agccaacttcatcgctcatgt

SEQ ID NO: 10672 - DNA, 21 bp, synthetic construct
  misc_feature 1..21: note = Synthetic
  source 1..21: mol_type = other DNA
agccacacctgggtgcaggcc

SEQ ID NO: 10673 - DNA, 21 bp, synthetic construct
  misc_feature 1..21: note = Synthetic
  source 1..21: mol_type = other DNA
agccaccctccaggttcacgc

SEQ ID NO: 10674 - DNA, 21 bp, synthetic construct
  misc_feature 1..21: note = Synthetic
  source 1..21: mol_type = other DNA
agccactcatacatacaacgg

SEQ ID NO: 10675 - DNA, 21 bp, synthetic construct
  misc_feature 1..21: note = Synthetic
  source 1..21: mol_type = other DNA
agccactgcgcccggcctcac

SEQ ID NO: 10676 - DNA, 21 bp, synthetic construct
  misc_feature 1..21: note = Synthetic
  source 1..21: mol_type = other DNA
agccacttgcttctctgggcc

SEQ ID NO: 10677 - DNA, 21 bp, synthetic construct
  misc_feature 1..21: note = Synthetic
  source 1..21: mol_type = other DNA
agccagatcatttccgacgcc

SEQ ID NO: 10678 - DNA, 21 bp, synthetic construct
  misc_feature 1..21: note = Synthetic
  source 1..21: mol_type = other DNA
agccagcccgtcgggggcctg

SEQ ID NO: 10679 - DNA, 21 bp, synthetic construct
  misc_feature 1..21: note = Synthetic
  source 1..21: mol_type = other DNA
agccaggatggtctcgatctc

SEQ ID NO: 10680 - DNA, 21 bp, synthetic construct
  misc_feature 1..21: note = Synthetic
  source 1..21: mol_type = other DNA
agccatcctggcactcagcgc

SEQ ID NO: 10681 - DNA, 21 bp, synthetic construct
  misc_feature 1..21: note = Synthetic
  source 1..21: mol_type = other DNA
agccatcttcgcagtcggggt

SEQ ID NO: 10682 - DNA, 21 bp, synthetic construct
  misc_feature 1..21: note = Synthetic
  source 1..21: mol_type = other DNA
agccatgaacaggatccacca

SEQ ID NO: 10683 - DNA, 21 bp, synthetic construct
  misc_feature 1..21: note = Synthetic
  source 1..21: mol_type = other DNA
agccatgttgcagactttgtc

SEQ ID NO: 10684 - DNA, 21 bp, synthetic construct
  misc_feature 1..21: note = Synthetic
  source 1..21: mol_type = other DNA
agccattgcatgggcactgtc

SEQ ID NO: 10685 - DNA, 21 bp, synthetic construct
  misc_feature 1..21: note = Synthetic
  source 1..21: mol_type = other DNA
agcccacagccttgcaggcct

SEQ ID NO: 10686 - DNA, 21 bp, synthetic construct
  misc_feature 1..21: note = Synthetic
  source 1..21: mol_type = other DNA
agcccaggggtggccccaggc

SEQ ID NO: 10687 - DNA, 21 bp, synthetic construct
  misc_feature 1..21: note = Synthetic
  source 1..21: mol_type = other DNA
agccccagggccccatgctcg

SEQ ID NO: 10688 - DNA, 21 bp, synthetic construct
  misc_feature 1..21: note = Synthetic
  source 1..21: mol_type = other DNA
agcccgtcgggggcctggatg

SEQ ID NO: 10689 - DNA, 21 bp, synthetic construct
  misc_feature 1..21: note = Synthetic
  source 1..21: mol_type = other DNA
agccctcacgctactgggctt

SEQ ID NO: 10690 - DNA, 21 bp, synthetic construct
  misc_feature 1..21: note = Synthetic
  source 1..21: mol_type = other DNA
agccgatcttaaggtcattgc

SEQ ID NO: 10691 - DNA, 21 bp, synthetic construct
  misc_feature 1..21: note = Synthetic
  source 1..21: mol_type = other DNA
agccgccagttcttccataga

SEQ ID NO: 10692 - DNA, 21 bp, synthetic construct
  misc_feature 1..21: note = Synthetic
  source 1..21: mol_type = other DNA
agccgccattgctcagggtgg

SEQ ID NO: 10693 - DNA, 21 bp, synthetic construct
  misc_feature 1..21: note = Synthetic
  source 1..21: mol_type = other DNA
agccgccgttgttgtccaagc

SEQ ID NO: 10694 - DNA, 21 bp, synthetic construct
  misc_feature 1..21: note = Synthetic
  source 1..21: mol_type = other DNA
agccgggaggtgtcgggaaca

SEQ ID NO: 10695 - DNA, 21 bp, synthetic construct
  misc_feature 1..21: note = Synthetic
  source 1..21: mol_type = other DNA
agccgtccaagcagtcccggt

SEQ ID NO: 10696 - DNA, 21 bp, synthetic construct
  misc_feature 1..21: note = Synthetic
  source 1..21: mol_type = other DNA
agccgtcctggttgtggcaaa

SEQ ID NO: 10697 - DNA, 21 bp, synthetic construct
  misc_feature 1..21: note = Synthetic
  source 1..21: mol_type = other DNA
agccgtcggggcacaggcact

SEQ ID NO: 10698 - DNA, 21 bp, synthetic construct
  misc_feature 1..21: note = Synthetic
  source 1..21: mol_type = other DNA
agccgttctccctgaataacg

SEQ ID NO: 10699 - DNA, 21 bp, synthetic construct
  misc_feature 1..21: note = Synthetic
  source 1..21: mol_type = other DNA
agccgttgtcgcagtccactt

SEQ ID NO: 10700 - DNA, 21 bp, synthetic construct
  misc_feature 1..21: note = Synthetic
  source 1..21: mol_type = other DNA
agcctcaaatgcctgagctca

SEQ ID NO: 10701 - DNA, 21 bp, synthetic construct
  misc_feature 1..21: note = Synthetic
  source 1..21: mol_type = other DNA
agcctcagcctctcttggctg

SEQ ID NO: 10702 - DNA, 21 bp, synthetic construct
  misc_feature 1..21: note = Synthetic
  source 1..21: mol_type = other DNA
agcctcagcctctgtgaggca

SEQ ID NO: 10703 - DNA, 21 bp, synthetic construct
  misc_feature 1..21: note = Synthetic
  source 1..21: mol_type = other DNA
agcctcccaaagtgctgggat

SEQ ID NO: 10704 - DNA, 21 bp, synthetic construct
  misc_feature 1..21: note = Synthetic
  source 1..21: mol_type = other DNA
agcctcccaagtagctgggat

SEQ ID NO: 10705 - DNA, 21 bp, synthetic construct
  misc_feature 1..21: note = Synthetic
  source 1..21: mol_type = other DNA
agcctcccgagtagctgggac

SEQ ID NO: 10706 - DNA, 21 bp, synthetic construct
  misc_feature 1..21: note = Synthetic
  source 1..21: mol_type = other DNA
agcctcgccatgcctggccag

SEQ ID NO: 10707 - DNA, 21 bp, synthetic construct
  misc_feature 1..21: note = Synthetic
  source 1..21: mol_type = other DNA
agcctctcttggctgggtgag

SEQ ID NO: 10708 - DNA, 21 bp, synthetic construct
  misc_feature 1..21: note = Synthetic
  source 1..21: mol_type = other DNA
agcctctgccaggcagtgtcc

SEQ ID NO: 10709 - DNA, 21 bp, synthetic construct
  misc_feature 1..21: note = Synthetic
  source 1..21: mol_type = other DNA
agcctctgtgaggcagctcct

SEQ ID NO: 10710 - DNA, 21 bp, synthetic construct
  misc_feature 1..21: note = Synthetic
  source 1..21: mol_type = other DNA
agcctcttttcatcctccaag

SEQ ID NO: 10711 - DNA, 21 bp, synthetic construct
  misc_feature 1..21: note = Synthetic
  source 1..21: mol_type = other DNA
agcctgacggtggatgtctcc

SEQ ID NO: 10712 - DNA, 21 bp, synthetic construct
  misc_feature 1..21: note = Synthetic
  source 1..21: mol_type = other DNA
agcctgttctgcctcccagat

SEQ ID NO: 10713 - DNA, 21 bp, synthetic construct
  misc_feature 1..21: note = Synthetic
  source 1..21: mol_type = other DNA
agccttcctcacactggcact

SEQ ID NO: 10714 - DNA, 21 bp, synthetic construct
  misc_feature 1..21: note = Synthetic
  source 1..21: mol_type = other DNA
agccttgcaggccttcgtgtg

SEQ ID NO: 10715 - DNA, 21 bp, synthetic construct
  misc_feature 1..21: note = Synthetic
  source 1..21: mol_type = other DNA
agccttgctcgtctgagccgt

SEQ ID NO: 10716 - DNA, 21 bp, synthetic construct
  misc_feature 1..21: note = Synthetic
  source 1..21: mol_type = other DNA
agcgaaactcgtcctgggagc

SEQ ID NO: 10717 - DNA, 21 bp, synthetic construct
  misc_feature 1..21: note = Synthetic
  source 1..21: mol_type = other DNA
agcgaccacgttcctcaggtt

SEQ ID NO: 10718 - DNA, 21 bp, synthetic construct
  misc_feature 1..21: note = Synthetic
  source 1..21: mol_type = other DNA
agcgagtagatgtccacacca

SEQ ID NO: 10719 - DNA, 21 bp, synthetic construct
  misc_feature 1..21: note = Synthetic
  source 1..21: mol_type = other DNA
agcgcaatttccagccccagg

SEQ ID NO: 10720 - DNA, 21 bp, synthetic construct
  misc_feature 1..21: note = Synthetic
  source 1..21: mol_type = other DNA
agcgcagttttcctcgtcaga

SEQ ID NO: 10721 - DNA, 21 bp, synthetic construct
  misc_feature 1..21: note = Synthetic
  source 1..21: mol_type = other DNA
agcgccagctggagtggatgc

SEQ ID NO: 10722 - DNA, 21 bp, synthetic construct
  misc_feature 1..21: note = Synthetic
  source 1..21: mol_type = other DNA
agcgctgccatcgcagaccca

SEQ ID NO: 10723 - DNA, 21 bp, synthetic construct
  misc_feature 1..21: note = Synthetic
  source 1..21: mol_type = other DNA
agcgctgcggccactcatccg

SEQ ID NO: 10724 - DNA, 21 bp, synthetic construct
  misc_feature 1..21: note = Synthetic
  source 1..21: mol_type = other DNA
agcggaaaccggggacttcgc

SEQ ID NO: 10725 - DNA, 21 bp, synthetic construct
  misc_feature 1..21: note = Synthetic
  source 1..21: mol_type = other DNA
agcggttgacacggcccccac

SEQ ID NO: 10726 - DNA, 21 bp, synthetic construct
  misc_feature 1..21: note = Synthetic
  source 1..21: mol_type = other DNA
agcgtcatcttcctgacctcg

SEQ ID NO: 10727 - DNA, 21 bp, synthetic construct
  misc_feature 1..21: note = Synthetic
  source 1..21: mol_type = other DNA
agcgttgcacacagtccagtt

SEQ ID NO: 10728 - DNA, 21 bp, synthetic construct
  misc_feature 1..21: note = Synthetic
  source 1..21: mol_type = other DNA
agctcaaaccatcctcccacc

SEQ ID NO: 10729 - DNA, 21 bp, synthetic construct
  misc_feature 1..21: note = Synthetic
  source 1..21: mol_type = other DNA
agctcacgacagcctcaaatg

SEQ ID NO: 10730 - DNA, 21 bp, synthetic construct
  misc_feature 1..21: note = Synthetic
  source 1..21: mol_type = other DNA
agctcagcctcccaaagtgct

SEQ ID NO: 10731 - DNA, 21 bp, synthetic construct
  misc_feature 1..21: note = Synthetic
  source 1..21: mol_type = other DNA
agctccgcttcccgggttcac

SEQ ID NO: 10732 - DNA, 21 bp, synthetic construct
  misc_feature 1..21: note = Synthetic
  source 1..21: mol_type = other DNA
agctccgtggcgatggggagg

SEQ ID NO: 10733 - DNA, 21 bp, synthetic construct
  misc_feature 1..21: note = Synthetic
  source 1..21: mol_type = other DNA
agctcctcatgtccctggcca

SEQ ID NO: 10734 - DNA, 21 bp, synthetic construct
  misc_feature 1..21: note = Synthetic
  source 1..21: mol_type = other DNA
agctctggcaggcaatgcttt

SEQ ID NO: 10735 - DNA, 21 bp, synthetic construct
  misc_feature 1..21: note = Synthetic
  source 1..21: mol_type = other DNA
agctgaagtccccggatttgc

SEQ ID NO: 10736 - DNA, 21 bp, synthetic construct
  misc_feature 1..21: note = Synthetic
  source 1..21: mol_type = other DNA
agctgacctttagcctgacgg

SEQ ID NO: 10737 - DNA, 21 bp, synthetic construct
  misc_feature 1..21: note = Synthetic
  source 1..21: mol_type = other DNA
agctgatttttaactttttgg

SEQ ID NO: 10738 - DNA, 21 bp, synthetic construct
  misc_feature 1..21: note = Synthetic
  source 1..21: mol_type = other DNA
agctgcccccgagaccagaga

SEQ ID NO: 10739 - DNA, 21 bp, synthetic construct
  misc_feature 1..21: note = Synthetic
  source 1..21: mol_type = other DNA
agctggaaaccctggcttccc

SEQ ID NO: 10740 - DNA, 21 bp, synthetic construct
  misc_feature 1..21: note = Synthetic
  source 1..21: mol_type = other DNA
agctggaagccgtcggggcac

SEQ ID NO: 10741 - DNA, 21 bp, synthetic construct
  misc_feature 1..21: note = Synthetic
  source 1..21: mol_type = other DNA
agctggaagccttcctcacac

SEQ ID NO: 10742 - DNA, 21 bp, synthetic construct
  misc_feature 1..21: note = Synthetic
  source 1..21: mol_type = other DNA
agctggagtggatgcactcgc

SEQ ID NO: 10743 - DNA, 21 bp, synthetic construct
  misc_feature 1..21: note = Synthetic
  source 1..21: mol_type = other DNA
agctggcgggaccacaggtga

SEQ ID NO: 10744 - DNA, 21 bp, synthetic construct
  misc_feature 1..21: note = Synthetic
  source 1..21: mol_type = other DNA
agctggctgcaggtgtcggga

SEQ ID NO: 10745 - DNA, 21 bp, synthetic construct
  misc_feature 1..21: note = Synthetic
  source 1..21: mol_type = other DNA
agctgggactacaggtgcccg

SEQ ID NO: 10746 - DNA, 21 bp, synthetic construct
  misc_feature 1..21: note = Synthetic
  source 1..21: mol_type = other DNA
agctgggatcacaggcacgtg

SEQ ID NO: 10747 - DNA, 21 bp, synthetic construct
  misc_feature 1..21: note = Synthetic
  source 1..21: mol_type = other DNA
agctgggggatgcaggtggag

SEQ ID NO: 10748 - DNA, 21 bp, synthetic construct
  misc_feature 1..21: note = Synthetic
  source 1..21: mol_type = other DNA
agctgggtgctgcagatcatt

SEQ ID NO: 10749 - DNA, 21 bp, synthetic construct
  misc_feature 1..21: note = Synthetic
  source 1..21: mol_type = other DNA
agctgtagccgtcctggttgt

SEQ ID NO: 10750 - DNA, 21 bp, synthetic construct
  misc_feature 1..21: note = Synthetic
  source 1..21: mol_type = other DNA
agctgttgcactggaagctgg

SEQ ID NO: 10751 - DNA, 21 bp, synthetic construct
  misc_feature 1..21: note = Synthetic
  source 1..21: mol_type = other DNA
agcttggtgagacattgtcac

SEQ ID NO: 10752 - DNA, 21 bp, synthetic construct
  misc_feature 1..21: note = Synthetic
  source 1..21: mol_type = other DNA
aggaaaggaagaaaccaaaat

SEQ ID NO: 10753 - DNA, 21 bp, synthetic construct
  misc_feature 1..21: note = Synthetic
  source 1..21: mol_type = other DNA
aggaaccgaggccttgagggt

SEQ ID NO: 10754 - DNA, 21 bp, synthetic construct
  misc_feature 1..21: note = Synthetic
  source 1..21: mol_type = other DNA
aggaaccgcggaggaacgcca

SEQ ID NO: 10755 - DNA, 21 bp, synthetic construct
  misc_feature 1..21: note = Synthetic
  source 1..21: mol_type = other DNA
aggaagaaaccaaaatcccaa

SEQ ID NO: 10756 - DNA, 21 bp, synthetic construct
  misc_feature 1..21: note = Synthetic
  source 1..21: mol_type = other DNA
aggaagacccccaggcaaagg

SEQ ID NO: 10757 - DNA, 21 bp, synthetic construct
  misc_feature 1..21: note = Synthetic
  source 1..21: mol_type = other DNA
aggaagacgaggagcacgatg

SEQ ID NO: 10758 - DNA, 21 bp, synthetic construct
  misc_feature 1..21: note = Synthetic
  source 1..21: mol_type = other DNA
aggaagacgaggagcactgta

SEQ ID NO: 10759 - DNA, 21 bp, synthetic construct
  misc_feature 1..21: note = Synthetic
  source 1..21: mol_type = other DNA
aggaagagacgccgtgggctc

SEQ ID NO: 10760 - DNA, 21 bp, synthetic construct
  misc_feature 1..21: note = Synthetic
  source 1..21: mol_type = other DNA
aggaagggttctgggcaggga

SEQ ID NO: 10761 - DNA, 21 bp, synthetic construct
  misc_feature 1..21: note = Synthetic
  source 1..21: mol_type = other DNA
aggaaggtacaaacccacctc

SEQ ID NO: 10762 - DNA, 21 bp, synthetic construct
  misc_feature 1..21: note = Synthetic
  source 1..21: mol_type = other DNA
aggaatgcagcggttgacacg

SEQ ID NO: 10763 - DNA, 21 bp, synthetic construct
  misc_feature 1..21: note = Synthetic
  source 1..21: mol_type = other DNA
aggacaaggtggggacggagg

SEQ ID NO: 10764 - DNA, 21 bp, synthetic construct
  misc_feature 1..21: note = Synthetic
  source 1..21: mol_type = other DNA
aggacaatggacagagccctc

SEQ ID NO: 10765 - DNA, 21 bp, synthetic construct
  misc_feature 1..21: note = Synthetic
  source 1..21: mol_type = other DNA
aggacagagtcggtccagtag

SEQ ID NO: 10766 - DNA, 21 bp, synthetic construct
  misc_feature 1..21: note = Synthetic
  source 1..21: mol_type = other DNA
aggacagccttgctcgtctga

SEQ ID NO: 10767 - DNA, 21 bp, synthetic construct
  misc_feature 1..21: note = Synthetic
  source 1..21: mol_type = other DNA
aggagaaggggtgggccagcc

SEQ ID NO: 10768 - DNA, 21 bp, synthetic construct
  misc_feature 1..21: note = Synthetic
  source 1..21: mol_type = other DNA
aggagaccacgggaatggaag

SEQ ID NO: 10769 - DNA, 21 bp, synthetic construct
  misc_feature 1..21: note = Synthetic
  source 1..21: mol_type = other DNA
aggagatctagggtgatgcca

SEQ ID NO: 10770 - DNA, 21 bp, synthetic construct
  misc_feature 1..21: note = Synthetic
  source 1..21: mol_type = other DNA
aggagatgcatttcccgtctt

SEQ ID NO: 10771 - DNA, 21 bp, synthetic construct
  misc_feature 1..21: note = Synthetic
  source 1..21: mol_type = other DNA
aggagcaaggcgacggtccag

SEQ ID NO: 10772 - DNA, 21 bp, synthetic construct
  misc_feature 1..21: note = Synthetic
  source 1..21: mol_type = other DNA
aggagcacgatggggaggaca

SEQ ID NO: 10773 - DNA, 21 bp, synthetic construct
  misc_feature 1..21: note = Synthetic
  source 1..21: mol_type = other DNA
aggagcactgtagggagaggc

SEQ ID NO: 10774 - DNA, 21 bp, synthetic construct
  misc_feature 1..21: note = Synthetic
  source 1..21: mol_type = other DNA
aggaggcctcgtctgagccgt

SEQ ID NO: 10775 - DNA, 21 bp, synthetic construct
  misc_feature 1..21: note = Synthetic
  source 1..21: mol_type = other DNA
aggagggcccaggataacgga

SEQ ID NO: 10776 - DNA, 21 bp, synthetic construct
  misc_feature 1..21: note = Synthetic
  source 1..21: mol_type = other DNA
aggaggggcggggagattctg

SEQ ID NO: 10777 - DNA, 21 bp, synthetic construct
  misc_feature 1..21: note = Synthetic
  source 1..21: mol_type = other DNA
aggataacggagggcgactcg

SEQ ID NO: 10778 - DNA, 21 bp, synthetic construct
  misc_feature 1..21: note = Synthetic
  source 1..21: mol_type = other DNA
aggatccaccacgatggccct

SEQ ID NO: 10779 - DNA, 21 bp, synthetic construct
  misc_feature 1..21: note = Synthetic
  source 1..21: mol_type = other DNA
aggatgggcaccaggctggtg

SEQ ID NO: 10780 - DNA, 21 bp, synthetic construct
  misc_feature 1..21: note = Synthetic
  source 1..21: mol_type = other DNA
aggatggtctcgatctcctga

SEQ ID NO: 10781 - DNA, 21 bp, synthetic construct
  misc_feature 1..21: note = Synthetic
  source 1..21: mol_type = other DNA
aggattgtgtcacggtggaga

SEQ ID NO: 10782 - DNA, 21 bp, synthetic construct
  misc_feature 1..21: note = Synthetic
  source 1..21: mol_type = other DNA
aggatttatttatttttttat

SEQ ID NO: 10783 - DNA, 21 bp, synthetic construct
  misc_feature 1..21: note = Synthetic
  source 1..21: mol_type = other DNA
aggcaaaggaagacgaggagc

SEQ ID NO: 10784 - DNA, 21 bp, synthetic construct
  misc_feature 1..21: note = Synthetic
  source 1..21: mol_type = other DNA
aggcaacgtttcaacctcgta

SEQ ID NO: 10785 - DNA, 21 bp, synthetic construct
  misc_feature 1..21: note = Synthetic
  source 1..21: mol_type = other DNA
aggcaataaccccctacacag

SEQ ID NO: 10786 - DNA, 21 bp, synthetic construct
  misc_feature 1..21: note = Synthetic
  source 1..21: mol_type = other DNA
aggcaatgctttggtcttctc

SEQ ID NO: 10787 - DNA, 21 bp, synthetic construct
  misc_feature 1..21: note = Synthetic
  source 1..21: mol_type = other DNA
aggcacagatactggcagccg

SEQ ID NO: 10788 - DNA, 21 bp, synthetic construct
  misc_feature 1..21: note = Synthetic
  source 1..21: mol_type = other DNA
aggcacctgtgtctggccaaa

SEQ ID NO: 10789 - DNA, 21 bp, synthetic construct
  misc_feature 1..21: note = Synthetic
  source 1..21: mol_type = other DNA
aggcacgctctgtcacacagc

SEQ ID NO: 10790 - DNA, 21 bp, synthetic construct
  misc_feature 1..21: note = Synthetic
  source 1..21: mol_type = other DNA
aggcacgtgccaccgtaccca

SEQ ID NO: 10791 - DNA, 21 bp, synthetic construct
  misc_feature 1..21: note = Synthetic
  source 1..21: mol_type = other DNA
aggcactcgtagccgatctta

SEQ ID NO: 10792 - DNA, 21 bp, synthetic construct
  misc_feature 1..21: note = Synthetic
  source 1..21: mol_type = other DNA
aggcacttaataaatattaag

SEQ ID NO: 10793 - DNA, 21 bp, synthetic construct
  misc_feature 1..21: note = Synthetic
  source 1..21: mol_type = other DNA
aggcagatgttcacgccacgt

SEQ ID NO: 10794 - DNA, 21 bp, synthetic construct
  misc_feature 1..21: note = Synthetic
  source 1..21: mol_type = other DNA
aggcagccgggaggtgtcggg

SEQ ID NO: 10795 - DNA, 21 bp, synthetic construct
  misc_feature 1..21: note = Synthetic
  source 1..21: mol_type = other DNA
aggcagctcctcatgtccctg

SEQ ID NO: 10796 - DNA, 21 bp, synthetic construct
  misc_feature 1..21: note = Synthetic
  source 1..21: mol_type = other DNA
aggcagggccagggggtcccg

SEQ ID NO: 10797 - DNA, 21 bp, synthetic construct
  misc_feature 1..21: note = Synthetic
  source 1..21: mol_type = other DNA
aggcagtggaactcgaaggcc

SEQ ID NO: 10798 - DNA, 21 bp, synthetic construct
  misc_feature 1..21: note = Synthetic
  source 1..21: mol_type = other DNA
aggcagtgtcccgacccggat

SEQ ID NO: 10799 - DNA, 21 bp, synthetic construct
  misc_feature 1..21: note = Synthetic
  source 1..21: mol_type = other DNA
aggcatttcagaggcaataac

SEQ ID NO: 10800 - DNA, 21 bp, synthetic construct
  misc_feature 1..21: note = Synthetic
  source 1..21: mol_type = other DNA
aggcatttgcatagaagtgga

SEQ ID NO: 10801 - DNA, 21 bp, synthetic construct
  misc_feature 1..21: note = Synthetic
  source 1..21: mol_type = other DNA
aggccacgtgtcctcacggcc

SEQ ID NO: 10802 - DNA, 21 bp, synthetic construct
  misc_feature 1..21: note = Synthetic
  source 1..21: mol_type = other DNA
aggccagactgcggactgcag

SEQ ID NO: 10803 - DNA, 21 bp, synthetic construct
  misc_feature 1..21: note = Synthetic
  source 1..21: mol_type = other DNA
aggccatgggctgctgatgca

SEQ ID NO: 10804 - DNA, 21 bp, synthetic construct
  misc_feature 1..21: note = Synthetic
  source 1..21: mol_type = other DNA
aggcccacagctgggggatgc

SEQ ID NO: 10805 - DNA, 21 bp, synthetic construct
  misc_feature 1..21: note = Synthetic
  source 1..21: mol_type = other DNA
aggccccctttcttgatcttg

SEQ ID NO: 10806 - DNA, 21 bp, synthetic construct
  misc_feature 1..21: note = Synthetic
  source 1..21: mol_type = other DNA
aggccgagcaggggctactgt

SEQ ID NO: 10807 - DNA, 21 bp, synthetic construct
  misc_feature 1..21: note = Synthetic
  source 1..21: mol_type = other DNA
aggccggcgaggtctcaggaa

SEQ ID NO: 10808 - DNA, 21 bp, synthetic construct
  misc_feature 1..21: note = Synthetic
  source 1..21: mol_type = other DNA
aggcctcgtctgagccgtcca

SEQ ID NO: 10809 - DNA, 21 bp, synthetic construct
  misc_feature 1..21: note = Synthetic
  source 1..21: mol_type = other DNA
aggcctggtctccaactcctg

SEQ ID NO: 10810 - DNA, 21 bp, synthetic construct
  misc_feature 1..21: note = Synthetic
  source 1..21: mol_type = other DNA
aggccttcgtgtgggggtcca

SEQ ID NO: 10811 - DNA, 21 bp, synthetic construct
  misc_feature 1..21: note = Synthetic
  source 1..21: mol_type = other DNA
aggccttgagggtggccgggg

SEQ ID NO: 10812 - DNA, 21 bp, synthetic construct
  misc_feature 1..21: note = Synthetic
  source 1..21: mol_type = other DNA
aggcgacggtccagcgcaatt

SEQ ID NO: 10813 - DNA, 21 bp, synthetic construct
  misc_feature 1..21: note = Synthetic
  source 1..21: mol_type = other DNA
aggcgatcctcctgcctcagc

SEQ ID NO: 10814 - DNA, 21 bp, synthetic construct
  misc_feature 1..21: note = Synthetic
  source 1..21: mol_type = other DNA
aggcgatggagcccacagcct

SEQ ID NO: 10815 - DNA, 21 bp, synthetic construct
  misc_feature 1..21: note = Synthetic
  source 1..21: mol_type = other DNA
aggcgcaggtaaacttgggcg

SEQ ID NO: 10816 - DNA, 21 bp, synthetic construct
  misc_feature 1..21: note = Synthetic
  source 1..21: mol_type = other DNA
aggcggccactgaggagatct

SEQ ID NO: 10817 - DNA, 21 bp, synthetic construct
  misc_feature 1..21: note = Synthetic
  source 1..21: mol_type = other DNA
aggcggctccggggacccggg

SEQ ID NO: 10818 - DNA, 21 bp, synthetic construct
  misc_feature 1..21: note = Synthetic
  source 1..21: mol_type = other DNA
aggcggttggcactgaaaatg

SEQ ID NO: 10819 - DNA, 21 bp, synthetic construct
  misc_feature 1..21: note = Synthetic
  source 1..21: mol_type = other DNA
aggcgtgagccactgcgcccg

SEQ ID NO: 10820 - DNA, 21 bp, synthetic construct
  misc_feature 1..21: note = Synthetic
  source 1..21: mol_type = other DNA
aggcgtgaggcacctgtgtct

SEQ ID NO: 10821 - DNA, 21 bp, synthetic construct
  misc_feature 1..21: note = Synthetic
  source 1..21: mol_type = other DNA
aggctaacctggctgtctagc

SEQ ID NO: 10822 - DNA, 21 bp, synthetic construct
  misc_feature 1..21: note = Synthetic
  source 1..21: mol_type = other DNA
aggctacaaaaaccttctata

SEQ ID NO: 10823 - DNA, 21 bp, synthetic construct
  misc_feature 1..21: note = Synthetic
  source 1..21: mol_type = other DNA
aggctctgcctctgggaagtg

SEQ ID NO: 10824 - DNA, 21 bp, synthetic construct
  misc_feature 1..21: note = Synthetic
  source 1..21: mol_type = other DNA
aggctggaaagcagtggcata

SEQ ID NO: 10825 - DNA, 21 bp, synthetic construct
  misc_feature 1..21: note = Synthetic
  source 1..21: mol_type = other DNA
aggctggagtgcagtggctcg

SEQ ID NO: 10826 - DNA, 21 bp, synthetic construct
  misc_feature 1..21: note = Synthetic
  source 1..21: mol_type = other DNA
aggctggtgtactcgctccgg

SEQ ID NO: 10827 - DNA, 21 bp, synthetic construct
  misc_feature 1..21: note = Synthetic
  source 1..21: mol_type = other DNA
aggctggtgtcctgacagcca

SEQ ID NO: 10828 - DNA, 21 bp, synthetic construct
  misc_feature 1..21: note = Synthetic
  source 1..21: mol_type = other DNA
aggctgtcactgtctctccgg

SEQ ID NO: 10829 - DNA, 21 bp, synthetic construct
  misc_feature 1..21: note = Synthetic
  source 1..21: mol_type = other DNA
aggcttatcacggttccctgc

SEQ ID NO: 10830 - DNA, 21 bp, synthetic construct
  misc_feature 1..21: note = Synthetic
  source 1..21: mol_type = other DNA
aggcttgcatagaagaggtaa

SEQ ID NO: 10831 - DNA, 21 bp, synthetic construct
  misc_feature 1..21: note = Synthetic
  source 1..21: mol_type = other DNA
agggacgcatttacgtgctcc

SEQ ID NO: 10832 - DNA, 21 bp, synthetic construct
  misc_feature 1..21: note = Synthetic
  source 1..21: mol_type = other DNA
agggacgggactccaggcaga

SEQ ID NO: 10833 - DNA, 21 bp, synthetic construct
  misc_feature 1..21: note = Synthetic
  source 1..21: mol_type = other DNA
agggagaggcacgctctgtca

SEQ ID NO: 10834 - DNA, 21 bp, synthetic construct
  misc_feature 1..21: note = Synthetic
  source 1..21: mol_type = other DNA
agggaggcacagatactggca

SEQ ID NO: 10835 - DNA, 21 bp, synthetic construct
  misc_feature 1..21: note = Synthetic
  source 1..21: mol_type = other DNA
agggcaaaggctaacctggct

SEQ ID NO: 10836 - DNA, 21 bp, synthetic construct
  misc_feature 1..21: note = Synthetic
  source 1..21: mol_type = other DNA
agggccagggggtcccgttgg

SEQ ID NO: 10837 - DNA, 21 bp, synthetic construct
  misc_feature 1..21: note = Synthetic
  source 1..21: mol_type = other DNA
agggcccaggataacggaggg

SEQ ID NO: 10838 - DNA, 21 bp, synthetic construct
  misc_feature 1..21: note = Synthetic
  source 1..21: mol_type = other DNA
agggccccatgctcgcagcct

SEQ ID NO: 10839 - DNA, 21 bp, synthetic construct
  misc_feature 1..21: note = Synthetic
  source 1..21: mol_type = other DNA
agggccccgagaatagtcact

SEQ ID NO: 10840 - DNA, 21 bp, synthetic construct
  misc_feature 1..21: note = Synthetic
  source 1..21: mol_type = other DNA
agggcgacaggtggccacagc

SEQ ID NO: 10841 - DNA, 21 bp, synthetic construct
  misc_feature 1..21: note = Synthetic
  source 1..21: mol_type = other DNA
agggcgacaggtggccacagg

SEQ ID NO: 10842 - DNA, 21 bp, synthetic construct
  misc_feature 1..21: note = Synthetic
  source 1..21: mol_type = other DNA
agggcgactcgtgtatgtcgc

SEQ ID NO: 10843 - DNA, 21 bp, synthetic construct
  misc_feature 1..21: note = Synthetic
  source 1..21: mol_type = other DNA
agggcgccccccaggacaagg

SEQ ID NO: 10844 - DNA, 21 bp, synthetic construct
  misc_feature 1..21: note = Synthetic
  source 1..21: mol_type = other DNA
aggggcggggagattctgagg

SEQ ID NO: 10845 - DNA, 21 bp, synthetic construct
  misc_feature 1..21: note = Synthetic
  source 1..21: mol_type = other DNA
aggggctactgtccccttgga

SEQ ID NO: 10846 - DNA, 21 bp, synthetic construct
  misc_feature 1..21: note = Synthetic
  source 1..21: mol_type = other DNA
agggggtcccgttggtgccat

SEQ ID NO: 10847 - DNA, 21 bp, synthetic construct
  misc_feature 1..21: note = Synthetic
  source 1..21: mol_type = other DNA
aggggtagctgtagccgtcct

SEQ ID NO: 10848 - DNA, 21 bp, synthetic construct
  misc_feature 1..21: note = Synthetic
  source 1..21: mol_type = other DNA
aggggtcgggaggatgggcac

SEQ ID NO: 10849 - DNA, 21 bp, synthetic construct
  misc_feature 1..21: note = Synthetic
  source 1..21: mol_type = other DNA
aggggtggccccaggcagccg

SEQ ID NO: 10850 - DNA, 21 bp, synthetic construct
  misc_feature 1..21: note = Synthetic
  source 1..21: mol_type = other DNA
aggggtgggccagcctctttt

SEQ ID NO: 10851 - DNA, 21 bp, synthetic construct
  misc_feature 1..21: note = Synthetic
  source 1..21: mol_type = other DNA
aggggtttggcttagagattg

SEQ ID NO: 10852 - DNA, 21 bp, synthetic construct
  misc_feature 1..21: note = Synthetic
  source 1..21: mol_type = other DNA
agggtcttcatctgttgccca

SEQ ID NO: 10853 - DNA, 21 bp, synthetic construct
  misc_feature 1..21: note = Synthetic
  source 1..21: mol_type = other DNA
agggtgaccagtgactcaggc

SEQ ID NO: 10854 - DNA, 21 bp, synthetic construct
  misc_feature 1..21: note = Synthetic
  source 1..21: mol_type = other DNA
agggtgatgcattcgccgctg

SEQ ID NO: 10855 - DNA, 21 bp, synthetic construct
  misc_feature 1..21: note = Synthetic
  source 1..21: mol_type = other DNA
agggtgatgccattgggccac

SEQ ID NO: 10856 - DNA, 21 bp, synthetic construct
  misc_feature 1..21: note = Synthetic
  source 1..21: mol_type = other DNA
agggtggccgggggcccctct

SEQ ID NO: 10857 - DNA, 21 bp, synthetic construct
  misc_feature 1..21: note = Synthetic
  source 1..21: mol_type = other DNA
agggtggtcctctcacaccag

SEQ ID NO: 10858 - DNA, 21 bp, synthetic construct
  misc_feature 1..21: note = Synthetic
  source 1..21: mol_type = other DNA
agggttctgggcagggacggg

SEQ ID NO: 10859 - DNA, 21 bp, synthetic construct
  misc_feature 1..21: note = Synthetic
  source 1..21: mol_type = other DNA
agggtttgcaaaaataaatag

SEQ ID NO: 10860 - DNA, 21 bp, synthetic construct
  misc_feature 1..21: note = Synthetic
  source 1..21: mol_type = other DNA
aggtaaacacgttgactcctg

SEQ ID NO: 10861 - DNA, 21 bp, synthetic construct
  misc_feature 1..21: note = Synthetic
  source 1..21: mol_type = other DNA
aggtaaacttgggcgagtggg

SEQ ID NO: 10862 - DNA, 21 bp, synthetic construct
  misc_feature 1..21: note = Synthetic
  source 1..21: mol_type = other DNA
aggtaaccgggtgtctcaggc

SEQ ID NO: 10863 - DNA, 21 bp, synthetic construct
  misc_feature 1..21: note = Synthetic
  source 1..21: mol_type = other DNA
aggtacaaacccacctcgaaa

SEQ ID NO: 10864 - DNA, 21 bp, synthetic construct
  misc_feature 1..21: note = Synthetic
  source 1..21: mol_type = other DNA
aggtaggcgatggagcccaca

SEQ ID NO: 10865 - DNA, 21 bp, synthetic construct
  misc_feature 1..21: note = Synthetic
  source 1..21: mol_type = other DNA
aggtcagaccagtagattcta

SEQ ID NO: 10866 - DNA, 21 bp, synthetic construct
  misc_feature 1..21: note = Synthetic
  source 1..21: mol_type = other DNA
aggtcattgcagacgtgggaa

SEQ ID NO: 10867 - DNA, 21 bp, synthetic construct
  misc_feature 1..21: note = Synthetic
  source 1..21: mol_type = other DNA
aggtcgggtggttgtgtgctg

SEQ ID NO: 10868 - DNA, 21 bp, synthetic construct
  misc_feature 1..21: note = Synthetic
  source 1..21: mol_type = other DNA
aggtctcaggaagggttctgg

SEQ ID NO: 10869 - DNA, 21 bp, synthetic construct
  misc_feature 1..21: note = Synthetic
  source 1..21: mol_type = other DNA
aggtgacagacaagcacgtct

SEQ ID NO: 10870 - DNA, 21 bp, synthetic construct
  misc_feature 1..21: note = Synthetic
  source 1..21: mol_type = other DNA
aggtgagcaccgggcaggagg

SEQ ID NO: 10871 - DNA, 21 bp, synthetic construct
  misc_feature 1..21: note = Synthetic
  source 1..21: mol_type = other DNA
aggtgcccgccaccacgcccg

SEQ ID NO: 10872 - DNA, 21 bp, synthetic construct
  misc_feature 1..21: note = Synthetic
  source 1..21: mol_type = other DNA
aggtggagctgttgcactgga

SEQ ID NO: 10873 - DNA, 21 bp, synthetic construct
  misc_feature 1..21: note = Synthetic
  source 1..21: mol_type = other DNA
aggtggccacagcgcagtttt

SEQ ID NO: 10874 - DNA, 21 bp, synthetic construct
  misc_feature 1..21: note = Synthetic
  source 1..21: mol_type = other DNA
aggtggccacaggacagcctt

SEQ ID NO: 10875 - DNA, 21 bp, synthetic construct
  misc_feature 1..21: note = Synthetic
  source 1..21: mol_type = other DNA
aggtgggcggacataaagacg

SEQ ID NO: 10876 - DNA, 21 bp, synthetic construct
  misc_feature 1..21: note = Synthetic
  source 1..21: mol_type = other DNA
aggtggggacggaggtgtcgc

SEQ ID NO: 10877 - DNA, 21 bp, synthetic construct
  misc_feature 1..21: note = Synthetic
  source 1..21: mol_type = other DNA
aggtgtcatcctggtcccccc

SEQ ID NO: 10878 - DNA, 21 bp, synthetic construct
  misc_feature 1..21: note = Synthetic
  source 1..21: mol_type = other DNA
aggtgtcgccacagagcacag

SEQ ID NO: 10879 - DNA, 21 bp, synthetic construct
  misc_feature 1..21: note = Synthetic
  source 1..21: mol_type = other DNA
aggtgtcgggaacaggtcggg

SEQ ID NO: 10880 - DNA, 21 bp, synthetic construct
  misc_feature 1..21: note = Synthetic
  source 1..21: mol_type = other DNA
aggtgtcgggatcctgacact

SEQ ID NO: 10881 - DNA, 21 bp, synthetic construct
  misc_feature 1..21: note = Synthetic
  source 1..21: mol_type = other DNA
aggttcacgcagagctggctg

SEQ ID NO: 10882 - DNA, 21 bp, synthetic construct
  misc_feature 1..21: note = Synthetic
  source 1..21: mol_type = other DNA
aggttggggatgaggctggtg

SEQ ID NO: 10883 - DNA, 21 bp, synthetic construct
  misc_feature 1..21: note = Synthetic
  source 1..21: mol_type = other DNA
aggttgtggaagagaaccata

SEQ ID NO: 10884 - DNA, 21 bp, synthetic construct
  misc_feature 1..21: note = Synthetic
  source 1..21: mol_type = other DNA
aggttttcagccaacaagttg

SEQ ID NO: 10885 - DNA, 21 bp, synthetic construct
  misc_feature 1..21: note = Synthetic
  source 1..21: mol_type = other DNA
agtaacacggcgatttcagaa

SEQ ID NO: 10886 - DNA, 21 bp, synthetic construct
  misc_feature 1..21: note = Synthetic
  source 1..21: mol_type = other DNA
agtaagacattcaggctacaa

SEQ ID NO: 10887 - DNA, 21 bp, synthetic construct
  misc_feature 1..21: note = Synthetic
  source 1..21: mol_type = other DNA
agtacatgaagccatgaacag

SEQ ID NO: 10888 - DNA, 21 bp, synthetic construct
  misc_feature 1..21: note = Synthetic
  source 1..21: mol_type = other DNA
agtagagacggggtttcacgt

SEQ ID NO: 10889 - DNA, 21 bp, synthetic construct
  misc_feature 1..21: note = Synthetic
  source 1..21: mol_type = other DNA
agtagaggcggccactgagga

SEQ ID NO: 10890 - DNA, 21 bp, synthetic construct
  misc_feature 1..21: note = Synthetic
  source 1..21: mol_type = other DNA
agtagatgtccacaccattca

SEQ ID NO: 10891 - DNA, 21 bp, synthetic construct
  misc_feature 1..21: note = Synthetic
  source 1..21: mol_type = other DNA
agtagatgttgctgtggatcc

SEQ ID NO: 10892 - DNA, 21 bp, synthetic construct
  misc_feature 1..21: note = Synthetic
  source 1..21: mol_type = other DNA
agtagattctattgctggcca

SEQ ID NO: 10893 - DNA, 21 bp, synthetic construct
  misc_feature 1..21: note = Synthetic
  source 1..21: mol_type = other DNA
agtagctgggactacaggtgc

SEQ ID NO: 10894 - DNA, 21 bp, synthetic construct
  misc_feature 1..21: note = Synthetic
  source 1..21: mol_type = other DNA
agtagctgggatcacaggcac

SEQ ID NO: 10895 - DNA, 21 bp, synthetic construct
  misc_feature 1..21: note = Synthetic
  source 1..21: mol_type = other DNA
agtaggttttcagccaacaag

SEQ ID NO: 10896 - DNA, 21 bp, synthetic construct
  misc_feature 1..21: note = Synthetic
  source 1..21: mol_type = other DNA
agtcaacccagtagaggcggc

SEQ ID NO: 10897 - DNA, 21 bp, synthetic construct
  misc_feature 1..21: note = Synthetic
  source 1..21: mol_type = other DNA
agtcacagacgaactgccgag

SEQ ID NO: 10898 - DNA, 21 bp, synthetic construct
  misc_feature 1..21: note = Synthetic
  source 1..21: mol_type = other DNA
agtcaccagcgagtagatgtc

SEQ ID NO: 10899 - DNA, 21 bp, synthetic construct
  misc_feature 1..21: note = Synthetic
  source 1..21: mol_type = other DNA
agtcactgaacaaatacagca

SEQ ID NO: 10900 - DNA, 21 bp, synthetic construct
  misc_feature 1..21: note = Synthetic
  source 1..21: mol_type = other DNA
agtcagtccagtacatgaagc

SEQ ID NO: 10901 - DNA, 21 bp, synthetic construct
  misc_feature 1..21: note = Synthetic
  source 1..21: mol_type = other DNA
agtcatattcccggtcacact

SEQ ID NO: 10902 - DNA, 21 bp, synthetic construct
  misc_feature 1..21: note = Synthetic
  source 1..21: mol_type = other DNA
agtccacagccagcccgtcgg

SEQ ID NO: 10903 - DNA, 21 bp, synthetic construct
  misc_feature 1..21: note = Synthetic
  source 1..21: mol_type = other DNA
agtccacttggccatcgcacc

SEQ ID NO: 10904 - DNA, 21 bp, synthetic construct
  misc_feature 1..21: note = Synthetic
  source 1..21: mol_type = other DNA
agtccagtacatgaagccatg

SEQ ID NO: 10905 - DNA, 21 bp, synthetic construct
  misc_feature 1..21: note = Synthetic
  source 1..21: mol_type = other DNA
agtccagttcgtgcaaataat

SEQ ID NO: 10906 - DNA, 21 bp, synthetic construct
  misc_feature 1..21: note = Synthetic
  source 1..21: mol_type = other DNA
agtccccgccgcggcgaggag

SEQ ID NO: 10907 - DNA, 21 bp, synthetic construct
  misc_feature 1..21: note = Synthetic
  source 1..21: mol_type = other DNA
agtccccggatttgcaggtga

SEQ ID NO: 10908 - DNA, 21 bp, synthetic construct
  misc_feature 1..21: note = Synthetic
  source 1..21: mol_type = other DNA
agtcccggcagtctctagcca

SEQ ID NO: 10909 - DNA, 21 bp, synthetic construct
  misc_feature 1..21: note = Synthetic
  source 1..21: mol_type = other DNA
agtcccggtcaacctgcccct

SEQ ID NO: 10910 - DNA, 21 bp, synthetic construct
  misc_feature 1..21: note = Synthetic
  source 1..21: mol_type = other DNA
agtcccggtctgagtcacaga

SEQ ID NO: 10911 - DNA, 21 bp, synthetic construct
  misc_feature 1..21: note = Synthetic
  source 1..21: mol_type = other DNA
agtcccgtcaaacgatccaga

SEQ ID NO: 10912 - DNA, 21 bp, synthetic construct
  misc_feature 1..21: note = Synthetic
  source 1..21: mol_type = other DNA
agtcggggccaccatcacagc

SEQ ID NO: 10913 - DNA, 21 bp, synthetic construct
  misc_feature 1..21: note = Synthetic
  source 1..21: mol_type = other DNA
agtcggggtcgttgtcgcagg

SEQ ID NO: 10914 - DNA, 21 bp, synthetic construct
  misc_feature 1..21: note = Synthetic
  source 1..21: mol_type = other DNA
agtcggtccagtagatgttgc

SEQ ID NO: 10915 - DNA, 21 bp, synthetic construct
  misc_feature 1..21: note = Synthetic
  source 1..21: mol_type = other DNA
agtctcgctctgtcgcccagg

SEQ ID NO: 10916 - DNA, 21 bp, synthetic construct
  misc_feature 1..21: note = Synthetic
  source 1..21: mol_type = other DNA
agtctctagccatgttgcaga

SEQ ID NO: 10917 - DNA, 21 bp, synthetic construct
  misc_feature 1..21: note = Synthetic
  source 1..21: mol_type = other DNA
agtctgacggaggctgtcact

SEQ ID NO: 10918 - DNA, 21 bp, synthetic construct
  misc_feature 1..21: note = Synthetic
  source 1..21: mol_type = other DNA
agtgaagtttggagtcaaccc

SEQ ID NO: 10919 - DNA, 21 bp, synthetic construct
  misc_feature 1..21: note = Synthetic
  source 1..21: mol_type = other DNA
agtgaatggcttggaggcatt

SEQ ID NO: 10920 - DNA, 21 bp, synthetic construct
  misc_feature 1..21: note = Synthetic
  source 1..21: mol_type = other DNA
agtgacacccatctcccagaa

SEQ ID NO: 10921 - DNA, 21 bp, synthetic construct
  misc_feature 1..21: note = Synthetic
  source 1..21: mol_type = other DNA
agtgactcaggctctgcctct

SEQ ID NO: 10922 - DNA, 21 bp, synthetic construct
  misc_feature 1..21: note = Synthetic
  source 1..21: mol_type = other DNA
agtgataacagtttcaaccaa

SEQ ID NO: 10923 - DNA, 21 bp, synthetic construct
  misc_feature 1..21: note = Synthetic
  source 1..21: mol_type = other DNA
agtgatccagctcagcctccc

SEQ ID NO: 10924 - DNA, 21 bp, synthetic construct
  misc_feature 1..21: note = Synthetic
  source 1..21: mol_type = other DNA
agtgcaaaataataacacaaa

SEQ ID NO: 10925 - DNA, 21 bp, synthetic construct
  misc_feature 1..21: note = Synthetic
  source 1..21: mol_type = other DNA
agtgcaaacataacaaaaaat

SEQ ID NO: 10926 - DNA, 21 bp, synthetic construct
  misc_feature 1..21: note = Synthetic
  source 1..21: mol_type = other DNA
agtgcaacagtaacacggcga

SEQ ID NO: 10927 - DNA, 21 bp, synthetic construct
  misc_feature 1..21: note = Synthetic
  source 1..21: mol_type = other DNA
agtgcaaggagaccacgggaa

SEQ ID NO: 10928 - DNA, 21 bp, synthetic construct
  misc_feature 1..21: note = Synthetic
  source 1..21: mol_type = other DNA
agtgcagtggctcgatcatgg

SEQ ID NO: 10929 - DNA, 21 bp, synthetic construct
  misc_feature 1..21: note = Synthetic
  source 1..21: mol_type = other DNA
agtgcccaggacagagtcggt

SEQ ID NO: 10930 - DNA, 21 bp, synthetic construct
  misc_feature 1..21: note = Synthetic
  source 1..21: mol_type = other DNA
agtgctgggattacaggcgtg

SEQ ID NO: 10931 - DNA, 21 bp, synthetic construct
  misc_feature 1..21: note = Synthetic
  source 1..21: mol_type = other DNA
agtggaactcgaaggccgagc

SEQ ID NO: 10932 - DNA, 21 bp, synthetic construct
  misc_feature 1..21: note = Synthetic
  source 1..21: mol_type = other DNA
agtggaagcactaggtgggcg

SEQ ID NO: 10933 - DNA, 21 bp, synthetic construct
  misc_feature 1..21: note = Synthetic
  source 1..21: mol_type = other DNA
agtggatgcactcgccactta

SEQ ID NO: 10934 - DNA, 21 bp, synthetic construct
  misc_feature 1..21: note = Synthetic
  source 1..21: mol_type = other DNA
agtggcataatcatagctcac

SEQ ID NO: 10935 - DNA, 21 bp, synthetic construct
  misc_feature 1..21: note = Synthetic
  source 1..21: mol_type = other DNA
agtggcatcatttggtgaatg

SEQ ID NO: 10936 - DNA, 21 bp, synthetic construct
  misc_feature 1..21: note = Synthetic
  source 1..21: mol_type = other DNA
agtggcgcaatctcggctcac

SEQ ID NO: 10937 - DNA, 21 bp, synthetic construct
  misc_feature 1..21: note = Synthetic
  source 1..21: mol_type = other DNA
agtggctcgatcatggctcac

SEQ ID NO: 10938 - DNA, 21 bp, synthetic construct
  misc_feature 1..21: note = Synthetic
  source 1..21: mol_type = other DNA
agtgggggttgatctgcgggg

SEQ ID NO: 10939 - DNA, 21 bp, synthetic construct
  misc_feature 1..21: note = Synthetic
  source 1..21: mol_type = other DNA
agtgggtaggggtcgggagga

SEQ ID NO: 10940 - DNA, 21 bp, synthetic construct
  misc_feature 1..21: note = Synthetic
  source 1..21: mol_type = other DNA
agtggtttaaaaagtgacacc

SEQ ID NO: 10941 - DNA, 21 bp, synthetic construct
  misc_feature 1..21: note = Synthetic
  source 1..21: mol_type = other DNA
agtgtacaactctgaactgag

SEQ ID NO: 10942 - DNA, 21 bp, synthetic construct
  misc_feature 1..21: note = Synthetic
  source 1..21: mol_type = other DNA
agtgtcacattaacgcagcca

SEQ ID NO: 10943 - DNA, 21 bp, synthetic construct
  misc_feature 1..21: note = Synthetic
  source 1..21: mol_type = other DNA
agtgtcagacagccttgctcg

SEQ ID NO: 10944 - DNA, 21 bp, synthetic construct
  misc_feature 1..21: note = Synthetic
  source 1..21: mol_type = other DNA
agtgtcccgacccggatcacg

SEQ ID NO: 10945 - DNA, 21 bp, synthetic construct
  misc_feature 1..21: note = Synthetic
  source 1..21: mol_type = other DNA
agtgttttgtccctggggaca

SEQ ID NO: 10946 - DNA, 21 bp, synthetic construct
  misc_feature 1..21: note = Synthetic
  source 1..21: mol_type = other DNA
agttcactcctcttggctggg

SEQ ID NO: 10947 - DNA, 21 bp, synthetic construct
  misc_feature 1..21: note = Synthetic
  source 1..21: mol_type = other DNA
agttccccagtcagtccagta

SEQ ID NO: 10948 - DNA, 21 bp, synthetic construct
  misc_feature 1..21: note = Synthetic
  source 1..21: mol_type = other DNA
agttcgtgcaaataatctttg

SEQ ID NO: 10949 - DNA, 21 bp, synthetic construct
  misc_feature 1..21: note = Synthetic
  source 1..21: mol_type = other DNA
agttctcgatattcacgatca

SEQ ID NO: 10950 - DNA, 21 bp, synthetic construct
  misc_feature 1..21: note = Synthetic
  source 1..21: mol_type = other DNA
agttcttccatagaaggaaga

SEQ ID NO: 10951 - DNA, 21 bp, synthetic construct
  misc_feature 1..21: note = Synthetic
  source 1..21: mol_type = other DNA
agttgacatcggaacctgtga

SEQ ID NO: 10952 - DNA, 21 bp, synthetic construct
  misc_feature 1..21: note = Synthetic
  source 1..21: mol_type = other DNA
agttgatgctgttgatgttct

SEQ ID NO: 10953 - DNA, 21 bp, synthetic construct
  misc_feature 1..21: note = Synthetic
  source 1..21: mol_type = other DNA
agttgtatttctgaaataggg

SEQ ID NO: 10954 - DNA, 21 bp, synthetic construct
  misc_feature 1..21: note = Synthetic
  source 1..21: mol_type = other DNA
agtttaggggtttggcttaga

SEQ ID NO: 10955 - DNA, 21 bp, synthetic construct
  misc_feature 1..21: note = Synthetic
  source 1..21: mol_type = other DNA
agtttcaaccaatatacaaag

SEQ ID NO: 10956 - DNA, 21 bp, synthetic construct
  misc_feature 1..21: note = Synthetic
  source 1..21: mol_type = other DNA
agtttccatcagagcactgga

SEQ ID NO: 10957 - DNA, 21 bp, synthetic construct
  misc_feature 1..21: note = Synthetic
  source 1..21: mol_type = other DNA
agtttggagtcaacccagtag

SEQ ID NO: 10958 - DNA, 21 bp, synthetic construct
  misc_feature 1..21: note = Synthetic
  source 1..21: mol_type = other DNA
agtttggtctcggtgccacca

SEQ ID NO: 10959 - DNA, 21 bp, synthetic construct
  misc_feature 1..21: note = Synthetic
  source 1..21: mol_type = other DNA
agttttcctcgtcagatttgt

SEQ ID NO: 10960 - DNA, 21 bp, synthetic construct
  misc_feature 1..21: note = Synthetic
  source 1..21: mol_type = other DNA
ataaaacaaagctctggcagg

SEQ ID NO: 10961 - DNA, 21 bp, synthetic construct
  misc_feature 1..21: note = Synthetic
  source 1..21: mol_type = other DNA
ataaaacaaggccggcgaggt

SEQ ID NO: 10962 - DNA, 21 bp, synthetic construct
  misc_feature 1..21: note = Synthetic
  source 1..21: mol_type = other DNA
ataaagaagaggcatttcaga

SEQ ID NO: 10963 - DNA, 21 bp, synthetic construct
  misc_feature 1..21: note = Synthetic
  source 1..21: mol_type = other DNA
ataaagacgacaatggcagtt

SEQ ID NO: 10964 - DNA, 21 bp, synthetic construct
  misc_feature 1..21: note = Synthetic
  source 1..21: mol_type = other DNA
ataaatagattttatatatat

SEQ ID NO: 10965 - DNA, 21 bp, synthetic construct
  misc_feature 1..21: note = Synthetic
  source 1..21: mol_type = other DNA
ataaatatataaaacaaagct

SEQ ID NO: 10966 - DNA, 21 bp, synthetic construct
  misc_feature 1..21: note = Synthetic
  source 1..21: mol_type = other DNA
ataaatattaagggtgaccag

SEQ ID NO: 10967 - DNA, 21 bp, synthetic construct
  misc_feature 1..21: note = Synthetic
  source 1..21: mol_type = other DNA
ataacaaaaaatccccactat

SEQ ID NO: 10968 - DNA, 21 bp, synthetic construct
  misc_feature 1..21: note = Synthetic
  source 1..21: mol_type = other DNA
ataacacaaatgccaaatgta

SEQ ID NO: 10969 - DNA, 21 bp, synthetic construct
  misc_feature 1..21: note = Synthetic
  source 1..21: mol_type = other DNA
ataacagtttcaaccaatata

SEQ ID NO: 10970 - DNA, 21 bp, synthetic construct
  misc_feature 1..21: note = Synthetic
  source 1..21: mol_type = other DNA
ataaccccctacacagggccc

SEQ ID NO: 10971 - DNA, 21 bp, synthetic construct
  misc_feature 1..21: note = Synthetic
  source 1..21: mol_type = other DNA
ataacggagggcgactcgtgt

SEQ ID NO: 10972 - DNA, 21 bp, synthetic construct
  misc_feature 1..21: note = Synthetic
  source 1..21: mol_type = other DNA
ataacgttttcctcttcacgc

SEQ ID NO: 10973 - DNA, 21 bp, synthetic construct
  misc_feature 1..21: note = Synthetic
  source 1..21: mol_type = other DNA
ataagtgataacagtttcaac

SEQ ID NO: 10974 - DNA, 21 bp, synthetic construct
  misc_feature 1..21: note = Synthetic
  source 1..21: mol_type = other DNA
ataataacacaaatgccaaat

SEQ ID NO: 10975 - DNA, 21 bp, synthetic construct
  misc_feature 1..21: note = Synthetic
  source 1..21: mol_type = other DNA
ataatcatagctcacgacagc

SEQ ID NO: 10976 - DNA, 21 bp, synthetic construct
  misc_feature 1..21: note = Synthetic
  source 1..21: mol_type = other DNA
ataatctttgtacataaagaa

SEQ ID NO: 10977 - DNA, 21 bp, synthetic construct
  misc_feature 1..21: note = Synthetic
  source 1..21: mol_type = other DNA
atacaaagtgcaaacataaca

SEQ ID NO: 10978 - DNA, 21 bp, synthetic construct
  misc_feature 1..21: note = Synthetic
  source 1..21: mol_type = other DNA
atacaacggggacatcattct

SEQ ID NO: 10979 - DNA, 21 bp, synthetic construct
  misc_feature 1..21: note = Synthetic
  source 1..21: mol_type = other DNA
atacagcaaccagggtttgca

SEQ ID NO: 10980 - DNA, 21 bp, synthetic construct
  misc_feature 1..21: note = Synthetic
  source 1..21: mol_type = other DNA
atacagtggtttaaaaagtga

SEQ ID NO: 10981 - DNA, 21 bp, synthetic construct
  misc_feature 1..21: note = Synthetic
  source 1..21: mol_type = other DNA
atacatacaacggggacatca

SEQ ID NO: 10982 - DNA, 21 bp, synthetic construct
  misc_feature 1..21: note = Synthetic
  source 1..21: mol_type = other DNA
atacccatcaacgacaagatt

SEQ ID NO: 10983 - DNA, 21 bp, synthetic construct
  misc_feature 1..21: note = Synthetic
  source 1..21: mol_type = other DNA
atactggcagccgccattgct

SEQ ID NO: 10984 - DNA, 21 bp, synthetic construct
  misc_feature 1..21: note = Synthetic
  source 1..21: mol_type = other DNA
atactttgtcctcaaagacgg

SEQ ID NO: 10985 - DNA, 21 bp, synthetic construct
  misc_feature 1..21: note = Synthetic
  source 1..21: mol_type = other DNA
atagaagaggtaaacacgttg

SEQ ID NO: 10986 - DNA, 21 bp, synthetic construct
  misc_feature 1..21: note = Synthetic
  source 1..21: mol_type = other DNA
atagaaggaagacccccaggc

SEQ ID NO: 10987 - DNA, 21 bp, synthetic construct
  misc_feature 1..21: note = Synthetic
  source 1..21: mol_type = other DNA
atagaagtggaagcactaggt

SEQ ID NO: 10988 - DNA, 21 bp, synthetic construct
  misc_feature 1..21: note = Synthetic
  source 1..21: mol_type = other DNA
atagacggggttgtcaaagtt

SEQ ID NO: 10989 - DNA, 21 bp, synthetic construct
  misc_feature 1..21: note = Synthetic
  source 1..21: mol_type = other DNA
atagattttatatatatgtgt

SEQ ID NO: 10990 - DNA, 21 bp, synthetic construct
  misc_feature 1..21: note = Synthetic
  source 1..21: mol_type = other DNA
atagctcacgacagcctcaaa

SEQ ID NO: 10991 - DNA, 21 bp, synthetic construct
  misc_feature 1..21: note = Synthetic
  source 1..21: mol_type = other DNA
ataggaagagacgccgtgggc

SEQ ID NO: 10992 - DNA, 21 bp, synthetic construct
  misc_feature 1..21: note = Synthetic
  source 1..21: mol_type = other DNA
atagggtcttcatctgttgcc

SEQ ID NO: 10993 - DNA, 21 bp, synthetic construct
  misc_feature 1..21: note = Synthetic
  source 1..21: mol_type = other DNA
atagtcactgaacaaatacag

SEQ ID NO: 10994 - DNA, 21 bp, synthetic construct
  misc_feature 1..21: note = Synthetic
  source 1..21: mol_type = other DNA
atagttgtatttctgaaatag

SEQ ID NO: 10995 - DNA, 21 bp, synthetic construct
  misc_feature 1..21: note = Synthetic
  source 1..21: mol_type = other DNA
atataaaacaaagctctggca

SEQ ID NO: 10996 - DNA, 21 bp, synthetic construct
  misc_feature 1..21: note = Synthetic
  source 1..21: mol_type = other DNA
atataagtgataacagtttca

SEQ ID NO: 10997 - DNA, 21 bp, synthetic construct
  misc_feature 1..21: note = Synthetic
  source 1..21: mol_type = other DNA
atatacaaagtgcaaacataa

SEQ ID NO: 10998 - DNA, 21 bp, synthetic construct
  misc_feature 1..21: note = Synthetic
  source 1..21: mol_type = other DNA
atatataaaacaaagctctgg

SEQ ID NO: 10999 - DNA, 21 bp, synthetic construct
  misc_feature 1..21: note = Synthetic
  source 1..21: mol_type = other DNA
atatataagtgataacagttt

SEQ ID NO: 11000 - DNA, 21 bp, synthetic construct
  misc_feature 1..21: note = Synthetic
  source 1..21: mol_type = other DNA
atatatataagtgataacagt

SEQ ID NO: 11001 - DNA, 21 bp, synthetic construct
  misc_feature 1..21: note = Synthetic
  source 1..21: mol_type = other DNA
atatatatataagtgataaca

SEQ ID NO: 11002 - DNA, 21 bp, synthetic construct
  misc_feature 1..21: note = Synthetic
  source 1..21: mol_type = other DNA
atatatatatataagtgataa

SEQ ID NO: 11003 - DNA, 21 bp, synthetic construct
  misc_feature 1..21: note = Synthetic
  source 1..21: mol_type = other DNA
atatatatatatataagtgat

SEQ ID NO: 11004 - DNA, 21 bp, synthetic construct
  misc_feature 1..21: note = Synthetic
  source 1..21: mol_type = other DNA
atatatatgtgtgtatatata

SEQ ID NO: 11005 - DNA, 21 bp, synthetic construct
  misc_feature 1..21: note = Synthetic
  source 1..21: mol_type = other DNA
atatatgtgtgtatatatata

SEQ ID NO: 11006 - DNA, 21 bp, synthetic construct
  misc_feature 1..21: note = Synthetic
  source 1..21: mol_type = other DNA
atatcctctggggacagtagg

SEQ ID NO: 11007 - DNA, 21 bp, synthetic construct
  misc_feature 1..21: note = Synthetic
  source 1..21: mol_type = other DNA
atatcgcactctttgatgggt

SEQ ID NO: 11008 - DNA, 21 bp, synthetic construct
  misc_feature 1..21: note = Synthetic
  source 1..21: mol_type = other DNA
atatctgtccaaaatactttg

SEQ ID NO: 11009 - DNA, 21 bp, synthetic construct
  misc_feature 1..21: note = Synthetic
  source 1..21: mol_type = other DNA
atatcttcgcatcttcgctgg

SEQ ID NO: 11010 - DNA, 21 bp, synthetic construct
  misc_feature 1..21: note = Synthetic
  source 1..21: mol_type = other DNA
atatgtgtgtatatatatata

SEQ ID NO: 11011 - DNA, 21 bp, synthetic construct
  misc_feature 1..21: note = Synthetic
  source 1..21: mol_type = other DNA
atattaagggtgaccagtgac

SEQ ID NO: 11012 - DNA, 21 bp, synthetic construct
  misc_feature 1..21: note = Synthetic
  source 1..21: mol_type = other DNA
atattcacgatcacggctttg

SEQ ID NO: 11013 - DNA, 21 bp, synthetic construct
  misc_feature 1..21: note = Synthetic
  source 1..21: mol_type = other DNA
atattcccggtcacactgccg

SEQ ID NO: 11014 - DNA, 21 bp, synthetic construct
  misc_feature 1..21: note = Synthetic
  source 1..21: mol_type = other DNA
atcaacgacaagattggggaa

SEQ ID NO: 11015 - DNA, 21 bp, synthetic construct
  misc_feature 1..21: note = Synthetic
  source 1..21: mol_type = other DNA
atcacagcgccagctggagtg

SEQ ID NO: 11016 - DNA, 21 bp, synthetic construct
  misc_feature 1..21: note = Synthetic
  source 1..21: mol_type = other DNA
atcacaggcacgtgccaccgt

SEQ ID NO: 11017 - DNA, 21 bp, synthetic construct
  misc_feature 1..21: note = Synthetic
  source 1..21: mol_type = other DNA
atcacagtaagacattcaggc

SEQ ID NO: 11018 - DNA, 21 bp, synthetic construct
  misc_feature 1..21: note = Synthetic
  source 1..21: mol_type = other DNA
atcacgacctgctgtgtccta

SEQ ID NO: 11019 - DNA, 21 bp, synthetic construct
  misc_feature 1..21: note = Synthetic
  source 1..21: mol_type = other DNA
atcacggctttgaagtcccgg

SEQ ID NO: 11020 - DNA, 21 bp, synthetic construct
  misc_feature 1..21: note = Synthetic
  source 1..21: mol_type = other DNA
atcacggttccctgcactggg

SEQ ID NO: 11021 - DNA, 21 bp, synthetic construct
  misc_feature 1..21: note = Synthetic
  source 1..21: mol_type = other DNA
atcagagcactggaattcgtc

SEQ ID NO: 11022 - DNA, 21 bp, synthetic construct
  misc_feature 1..21: note = Synthetic
  source 1..21: mol_type = other DNA
atcagagccatcctggcactc

SEQ ID NO: 11023 - DNA, 21 bp, synthetic construct
  misc_feature 1..21: note = Synthetic
  source 1..21: mol_type = other DNA
atcagtgcaacagtaacacgg

SEQ ID NO: 11024 - DNA, 21 bp, synthetic construct
  misc_feature 1..21: note = Synthetic
  source 1..21: mol_type = other DNA
atcatagctcacgacagcctc

SEQ ID NO: 11025 - DNA, 21 bp, synthetic construct
  misc_feature 1..21: note = Synthetic
  source 1..21: mol_type = other DNA
atcatggctcactgcaacctc

SEQ ID NO: 11026 - DNA, 21 bp, synthetic construct
  misc_feature 1..21: note = Synthetic
  source 1..21: mol_type = other DNA
atcattctcccaaaaagcgtt

SEQ ID NO: 11027 - DNA, 21 bp, synthetic construct
  misc_feature 1..21: note = Synthetic
  source 1..21: mol_type = other DNA
atcattctctgggacaggtca

SEQ ID NO: 11028 - DNA, 21 bp, synthetic construct
  misc_feature 1..21: note = Synthetic
  source 1..21: mol_type = other DNA
atcatttccgacgccatgaat

SEQ ID NO: 11029 - DNA, 21 bp, synthetic construct
  misc_feature 1..21: note = Synthetic
  source 1..21: mol_type = other DNA
atcatttggtgaatgagtttg

SEQ ID NO: 11030 - DNA, 21 bp, synthetic construct
  misc_feature 1..21: note = Synthetic
  source 1..21: mol_type = other DNA
atccaccacgatggcccttgg

SEQ ID NO: 11031 - DNA, 21 bp, synthetic construct
  misc_feature 1..21: note = Synthetic
  source 1..21: mol_type = other DNA
atccacccgcctcggcctccc

SEQ ID NO: 11032 - DNA, 21 bp, synthetic construct
  misc_feature 1..21: note = Synthetic
  source 1..21: mol_type = other DNA
atccagactggaggatttatt

SEQ ID NO: 11033 - DNA, 21 bp, synthetic construct
  misc_feature 1..21: note = Synthetic
  source 1..21: mol_type = other DNA
atccagctcagcctcccaaag

SEQ ID NO: 11034 - DNA, 21 bp, synthetic construct
  misc_feature 1..21: note = Synthetic
  source 1..21: mol_type = other DNA
atccagtccacagccagcccg

SEQ ID NO: 11035 - DNA, 21 bp, synthetic construct
  misc_feature 1..21: note = Synthetic
  source 1..21: mol_type = other DNA
atcccaacacacacgacagaa

SEQ ID NO: 11036 - DNA, 21 bp, synthetic construct
  misc_feature 1..21: note = Synthetic
  source 1..21: mol_type = other DNA
atcccaacccaagccattgca

SEQ ID NO: 11037 - DNA, 21 bp, synthetic construct
  misc_feature 1..21: note = Synthetic
  source 1..21: mol_type = other DNA
atcccatcccaacacacacga

SEQ ID NO: 11038 - DNA, 21 bp, synthetic construct
  misc_feature 1..21: note = Synthetic
  source 1..21: mol_type = other DNA
atccccactatctgtacaggg

SEQ ID NO: 11039 - DNA, 21 bp, synthetic construct
  misc_feature 1..21: note = Synthetic
  source 1..21: mol_type = other DNA
atcccctcccctttcatcttc

SEQ ID NO: 11040 - DNA, 21 bp, synthetic construct
  misc_feature 1..21: note = Synthetic
  source 1..21: mol_type = other DNA
atcccttgtgacatcttcacg

SEQ ID NO: 11041 - DNA, 21 bp, synthetic construct
  misc_feature 1..21: note = Synthetic
  source 1..21: mol_type = other DNA
atccctttcctggcttaagga

SEQ ID NO: 11042 - DNA, 21 bp, synthetic construct
  misc_feature 1..21: note = Synthetic
  source 1..21: mol_type = other DNA
atccgagccatcttcgcagtc

SEQ ID NO: 11043 - DNA, 21 bp, synthetic construct
  misc_feature 1..21: note = Synthetic
  source 1..21: mol_type = other DNA
atccgcaacagagacagtgcc

SEQ ID NO: 11044 - DNA, 21 bp, synthetic construct
  misc_feature 1..21: note = Synthetic
  source 1..21: mol_type = other DNA
atcctccaagatggtcttccg

SEQ ID NO: 11045 - DNA, 21 bp, synthetic construct
  misc_feature 1..21: note = Synthetic
  source 1..21: mol_type = other DNA
atcctccagactgaccatcga

SEQ ID NO: 11046 - DNA, 21 bp, synthetic construct
  misc_feature 1..21: note = Synthetic
  source 1..21: mol_type = other DNA
atcctccagactgaccatctg

SEQ ID NO: 11047 - DNA, 21 bp, synthetic construct
  misc_feature 1..21: note = Synthetic
  source 1..21: mol_type = other DNA
atcctcccacctcagcctcgc

SEQ ID NO: 11048 - DNA, 21 bp, synthetic construct
  misc_feature 1..21: note = Synthetic
  source 1..21: mol_type = other DNA
atcctcctgcctcagcctccc

SEQ ID NO: 11049 - DNA, 21 bp, synthetic construct
  misc_feature 1..21: note = Synthetic
  source 1..21: mol_type = other DNA
atcctctggggacagtaggtt

SEQ ID NO: 11050 - DNA, 21 bp, synthetic construct
  misc_feature 1..21: note = Synthetic
  source 1..21: mol_type = other DNA
atcctctgtggtcttctgata

SEQ ID NO: 11051 - DNA, 21 bp, synthetic construct
  misc_feature 1..21: note = Synthetic
  source 1..21: mol_type = other DNA
atcctgacactcatcgatatc

SEQ ID NO: 11052 - DNA, 21 bp, synthetic construct
  misc_feature 1..21: note = Synthetic
  source 1..21: mol_type = other DNA
atcctggcactcagcgctgcc

SEQ ID NO: 11053 - DNA, 21 bp, synthetic construct
  misc_feature 1..21: note = Synthetic
  source 1..21: mol_type = other DNA
atcctggtccccccgggcctg

SEQ ID NO: 11054 - DNA, 21 bp, synthetic construct
  misc_feature 1..21: note = Synthetic
  source 1..21: mol_type = other DNA
atccttcacgaggaaaggaag

SEQ ID NO: 11055 - DNA, 21 bp, synthetic construct
  misc_feature 1..21: note = Synthetic
  source 1..21: mol_type = other DNA
atcgaggggtagctgtagccg

SEQ ID NO: 11056 - DNA, 21 bp, synthetic construct
  misc_feature 1..21: note = Synthetic
  source 1..21: mol_type = other DNA
atcgatatcgcactctttgat

SEQ ID NO: 11057 - DNA, 21 bp, synthetic construct
  misc_feature 1..21: note = Synthetic
  source 1..21: mol_type = other DNA
atcgatatcttcgcatcttcg

SEQ ID NO: 11058 - DNA, 21 bp, synthetic construct
  misc_feature 1..21: note = Synthetic
  source 1..21: mol_type = other DNA
atcgatgcttgagatggagtg

SEQ ID NO: 11059 - DNA, 21 bp, synthetic construct
  misc_feature 1..21: note = Synthetic
  source 1..21: mol_type = other DNA
atcgcacctccagaactgagg

SEQ ID NO: 11060 - DNA, 21 bp, synthetic construct
  misc_feature 1..21: note = Synthetic
  source 1..21: mol_type = other DNA
atcgcactctttgatgggttc

SEQ ID NO: 11061 - DNA, 21 bp, synthetic construct
  misc_feature 1..21: note = Synthetic
  source 1..21: mol_type = other DNA
atcgcagacccacttgtagga

SEQ ID NO: 11062 - DNA, 21 bp, synthetic construct
  misc_feature 1..21: note = Synthetic
  source 1..21: mol_type = other DNA
atcgctcatgtccttgcagtc

SEQ ID NO: 11063 - DNA, 21 bp, synthetic construct
  misc_feature 1..21: note = Synthetic
  source 1..21: mol_type = other DNA
atcggaacctgtgaggcggtt

SEQ ID NO: 11064 - DNA, 21 bp, synthetic construct
  misc_feature 1..21: note = Synthetic
  source 1..21: mol_type = other DNA
atcggggctggtggggcgagg

SEQ ID NO: 11065 - DNA, 21 bp, synthetic construct
  misc_feature 1..21: note = Synthetic
  source 1..21: mol_type = other DNA
atcgtggcagcgaaactcgtc

SEQ ID NO: 11066 - DNA, 21 bp, synthetic construct
  misc_feature 1..21: note = Synthetic
  source 1..21: mol_type = other DNA
atctagggtgatgccattggg

SEQ ID NO: 11067 - DNA, 21 bp, synthetic construct
  misc_feature 1..21: note = Synthetic
  source 1..21: mol_type = other DNA
atctccaccgtggtgagccca

SEQ ID NO: 11068 - DNA, 21 bp, synthetic construct
  misc_feature 1..21: note = Synthetic
  source 1..21: mol_type = other DNA
atctcccagaagccactcata

SEQ ID NO: 11069 - DNA, 21 bp, synthetic construct
  misc_feature 1..21: note = Synthetic
  source 1..21: mol_type = other DNA
atctcctgacctcatgatcca

SEQ ID NO: 11070 - DNA, 21 bp, synthetic construct
  misc_feature 1..21: note = Synthetic
  source 1..21: mol_type = other DNA
atctcgctttgttgctcaggc

SEQ ID NO: 11071 - DNA, 21 bp, synthetic construct
  misc_feature 1..21: note = Synthetic
  source 1..21: mol_type = other DNA
atctcggctcactgcaagctc

SEQ ID NO: 11072 - DNA, 21 bp, synthetic construct
  misc_feature 1..21: note = Synthetic
  source 1..21: mol_type = other DNA
atctcggctgcagaccaagga

SEQ ID NO: 11073 - DNA, 21 bp, synthetic construct
  misc_feature 1..21: note = Synthetic
  source 1..21: mol_type = other DNA
atctgaccagtcccggcagtc

SEQ ID NO: 11074 - DNA, 21 bp, synthetic construct
  misc_feature 1..21: note = Synthetic
  source 1..21: mol_type = other DNA
atctgcggggcagggaggcac

SEQ ID NO: 11075 - DNA, 21 bp, synthetic construct
  misc_feature 1..21: note = Synthetic
  source 1..21: mol_type = other DNA
atctgctgttgtgtgttgaaa

SEQ ID NO: 11076 - DNA, 21 bp, synthetic construct
  misc_feature 1..21: note = Synthetic
  source 1..21: mol_type = other DNA
atctgtacagggacgcattta

SEQ ID NO: 11077 - DNA, 21 bp, synthetic construct
  misc_feature 1..21: note = Synthetic
  source 1..21: mol_type = other DNA
atctgtccaaaatactttgtc

SEQ ID NO: 11078 - DNA, 21 bp, synthetic construct
  misc_feature 1..21: note = Synthetic
  source 1..21: mol_type = other DNA
atctgtcgcccacgtggctga

SEQ ID NO: 11079 - DNA, 21 bp, synthetic construct
  misc_feature 1..21: note = Synthetic
  source 1..21: mol_type = other DNA
atctgtcgcccactgcagtcc

SEQ ID NO: 11080 - DNA, 21 bp, synthetic construct
  misc_feature 1..21: note = Synthetic
  source 1..21: mol_type = other DNA
atctgtctcgaggggtagctg

SEQ ID NO: 11081 - DNA, 21 bp, synthetic construct
  misc_feature 1..21: note = Synthetic
  source 1..21: mol_type = other DNA
atctgttgcccaggctggagt

SEQ ID NO: 11082 - DNA, 21 bp, synthetic construct
  misc_feature 1..21: note = Synthetic
  source 1..21: mol_type = other DNA
atcttaaggtcattgcagacg

SEQ ID NO: 11083 - DNA, 21 bp, synthetic construct
  misc_feature 1..21: note = Synthetic
  source 1..21: mol_type = other DNA
atcttcacgcgggagtctgac

SEQ ID NO: 11084 - DNA, 21 bp, synthetic construct
  misc_feature 1..21: note = Synthetic
  source 1..21: mol_type = other DNA
atcttccatgtttgaggattg

SEQ ID NO: 11085 - DNA, 21 bp, synthetic construct
  misc_feature 1..21: note = Synthetic
  source 1..21: mol_type = other DNA
atcttcctgacctcgtgccgg

SEQ ID NO: 11086 - DNA, 21 bp, synthetic construct
  misc_feature 1..21: note = Synthetic
  source 1..21: mol_type = other DNA
atcttcgcagtcggggtcgtt

SEQ ID NO: 11087 - DNA, 21 bp, synthetic construct
  misc_feature 1..21: note = Synthetic
  source 1..21: mol_type = other DNA
atcttcgcatcttcgctgggc

SEQ ID NO: 11088 - DNA, 21 bp, synthetic construct
  misc_feature 1..21: note = Synthetic
  source 1..21: mol_type = other DNA
atcttcgctgggccaccagct

SEQ ID NO: 11089 - DNA, 21 bp, synthetic construct
  misc_feature 1..21: note = Synthetic
  source 1..21: mol_type = other DNA
atcttggcgggagttccccag

SEQ ID NO: 11090 - DNA, 21 bp, synthetic construct
  misc_feature 1..21: note = Synthetic
  source 1..21: mol_type = other DNA
atctttgtacataaagaagag

SEQ ID NO: 11091 - DNA, 21 bp, synthetic construct
  misc_feature 1..21: note = Synthetic
  source 1..21: mol_type = other DNA
atgaacaggatccaccacgat

SEQ ID NO: 11092 - DNA, 21 bp, synthetic construct
  misc_feature 1..21: note = Synthetic
  source 1..21: mol_type = other DNA
atgaagccatgaacaggatcc

SEQ ID NO: 11093 - DNA, 21 bp, synthetic construct
  misc_feature 1..21: note = Synthetic
  source 1..21: mol_type = other DNA
atgaataaatatataaaacaa

SEQ ID NO: 11094 - DNA, 21 bp, synthetic construct
  misc_feature 1..21: note = Synthetic
  source 1..21: mol_type = other DNA
atgaatccctttcctggctta

SEQ ID NO: 11095 - DNA, 21 bp, synthetic construct
  misc_feature 1..21: note = Synthetic
  source 1..21: mol_type = other DNA
atgacggtgtcataggaagag

SEQ ID NO: 11096 - DNA, 21 bp, synthetic construct
  misc_feature 1..21: note = Synthetic
  source 1..21: mol_type = other DNA
atgaggcagggccagggggtc

SEQ ID NO: 11097 - DNA, 21 bp, synthetic construct
  misc_feature 1..21: note = Synthetic
  source 1..21: mol_type = other DNA
atgaggctggtgtactcgctc

SEQ ID NO: 11098 - DNA, 21 bp, synthetic construct
  misc_feature 1..21: note = Synthetic
  source 1..21: mol_type = other DNA
atgagtttggtctcggtgcca

SEQ ID NO: 11099 - DNA, 21 bp, synthetic construct
  misc_feature 1..21: note = Synthetic
  source 1..21: mol_type = other DNA
atgatatctgtccaaaatact

SEQ ID NO: 11100 - DNA, 21 bp, synthetic construct
  misc_feature 1..21: note = Synthetic
  source 1..21: mol_type = other DNA
atgatccacccgcctcggcct

SEQ ID NO: 11101 - DNA, 21 bp, synthetic construct
  misc_feature 1..21: note = Synthetic
  source 1..21: mol_type = other DNA
atgattcgggggtgacagggc

SEQ ID NO: 11102 - DNA, 21 bp, synthetic construct
  misc_feature 1..21: note = Synthetic
  source 1..21: mol_type = other DNA
atgcaccatgcatggtttttt

SEQ ID NO: 11103 - DNA, 21 bp, synthetic construct
  misc_feature 1..21: note = Synthetic
  source 1..21: mol_type = other DNA
atgcactcgccacttaggcag

SEQ ID NO: 11104 - DNA, 21 bp, synthetic construct
  misc_feature 1..21: note = Synthetic
  source 1..21: mol_type = other DNA
atgcacttcccatcgtggcag

SEQ ID NO: 11105 - DNA, 21 bp, synthetic construct
  misc_feature 1..21: note = Synthetic
  source 1..21: mol_type = other DNA
atgcagcggttgacacggccc

SEQ ID NO: 11106 - DNA, 21 bp, synthetic construct
  misc_feature 1..21: note = Synthetic
  source 1..21: mol_type = other DNA
atgcaggtggagctgttgcac

SEQ ID NO: 11107 - DNA, 21 bp, synthetic construct
  misc_feature 1..21: note = Synthetic
  source 1..21: mol_type = other DNA
atgcagtttccatcagagcac

SEQ ID NO: 11108 - DNA, 21 bp, synthetic construct
  misc_feature 1..21: note = Synthetic
  source 1..21: mol_type = other DNA
atgcatggtttttttttgttt

SEQ ID NO: 11109 - DNA, 21 bp, synthetic construct
  misc_feature 1..21: note = Synthetic
  source 1..21: mol_type = other DNA
atgcattcgccgctgtgacac

SEQ ID NO: 11110 - DNA, 21 bp, synthetic construct
  misc_feature 1..21: note = Synthetic
  source 1..21: mol_type = other DNA
atgcatttcccgtcttggcac

SEQ ID NO: 11111 - DNA, 21 bp, synthetic construct
  misc_feature 1..21: note = Synthetic
  source 1..21: mol_type = other DNA
atgccaaatgtacacagtgta

SEQ ID NO: 11112 - DNA, 21 bp, synthetic construct
  misc_feature 1..21: note = Synthetic
  source 1..21: mol_type = other DNA
atgccattgggccactgaatg

SEQ ID NO: 11113 - DNA, 21 bp, synthetic construct
  misc_feature 1..21: note = Synthetic
  source 1..21: mol_type = other DNA
atgccgtccgggcaggcgcag

SEQ ID NO: 11114 - DNA, 21 bp, synthetic construct
  misc_feature 1..21: note = Synthetic
  source 1..21: mol_type = other DNA
atgcctgagctcaaaccatcc

SEQ ID NO: 11115 - DNA, 21 bp, synthetic construct
  misc_feature 1..21: note = Synthetic
  source 1..21: mol_type = other DNA
atgcctggccagaggccatgg

SEQ ID NO: 11116 - DNA, 21 bp, synthetic construct
  misc_feature 1..21: note = Synthetic
  source 1..21: mol_type = other DNA
atgctcgcagcctctgccagg

SEQ ID NO: 11117 - DNA, 21 bp, synthetic construct
  misc_feature 1..21: note = Synthetic
  source 1..21: mol_type = other DNA
atgctgttgatgttcttaagc

SEQ ID NO: 11118 - DNA, 21 bp, synthetic construct
  misc_feature 1..21: note = Synthetic
  source 1..21: mol_type = other DNA
atgcttgagatggagtgaagt

SEQ ID NO: 11119 - DNA, 21 bp, synthetic construct
  misc_feature 1..21: note = Synthetic
  source 1..21: mol_type = other DNA
atgctttggtcttctctgtct

SEQ ID NO: 11120 - DNA, 21 bp, synthetic construct
  misc_feature 1..21: note = Synthetic
  source 1..21: mol_type = other DNA
atggaagtgggtaggggtcgg

SEQ ID NO: 11121 - DNA, 21 bp, synthetic construct
  misc_feature 1..21: note = Synthetic
  source 1..21: mol_type = other DNA
atggacagagccctcacgcta

SEQ ID NO: 11122 - DNA, 21 bp, synthetic construct
  misc_feature 1..21: note = Synthetic
  source 1..21: mol_type = other DNA
atggagcccacagccttgcag

SEQ ID NO: 11123 - DNA, 21 bp, synthetic construct
  misc_feature 1..21: note = Synthetic
  source 1..21: mol_type = other DNA
atggaggtgtcatcctggtcc

SEQ ID NO: 11124 - DNA, 21 bp, synthetic construct
  misc_feature 1..21: note = Synthetic
  source 1..21: mol_type = other DNA
atggagtgaagtttggagtca

SEQ ID NO: 11125 - DNA, 21 bp, synthetic construct
  misc_feature 1..21: note = Synthetic
  source 1..21: mol_type = other DNA
atggatgcagtttccatcaga

SEQ ID NO: 11126 - DNA, 21 bp, synthetic construct
  misc_feature 1..21: note = Synthetic
  source 1..21: mol_type = other DNA
atggcagttctcgatattcac

SEQ ID NO: 11127 - DNA, 21 bp, synthetic construct
  misc_feature 1..21: note = Synthetic
  source 1..21: mol_type = other DNA
atggcccttggcttggagccg

SEQ ID NO: 11128 - DNA, 21 bp, synthetic construct
  misc_feature 1..21: note = Synthetic
  source 1..21: mol_type = other DNA
atggctcactgcaacctccac

SEQ ID NO: 11129 - DNA, 21 bp, synthetic construct
  misc_feature 1..21: note = Synthetic
  source 1..21: mol_type = other DNA
atggcttcgttgatgatatct

SEQ ID NO: 11130 - DNA, 21 bp, synthetic construct
  misc_feature 1..21: note = Synthetic
  source 1..21: mol_type = other DNA
atggcttggaggcatttgcat

SEQ ID NO: 11131 - DNA, 21 bp, synthetic construct
  misc_feature 1..21: note = Synthetic
  source 1..21: mol_type = other DNA
atgggatctcgctttgttgct

SEQ ID NO: 11132 - DNA, 21 bp, synthetic construct
  misc_feature 1..21: note = Synthetic
  source 1..21: mol_type = other DNA
atgggcaccaggctggtgtcc

SEQ ID NO: 11133 - DNA, 21 bp, synthetic construct
  misc_feature 1..21: note = Synthetic
  source 1..21: mol_type = other DNA
atgggcactgtccgaagcctg

SEQ ID NO: 11134 - DNA, 21 bp, synthetic construct
  misc_feature 1..21: note = Synthetic
  source 1..21: mol_type = other DNA
atgggctgctgatgcaccatg

SEQ ID NO: 11135 - DNA, 21 bp, synthetic construct
  misc_feature 1..21: note = Synthetic
  source 1..21: mol_type = other DNA
atggggaggacaatggacaga

SEQ ID NO: 11136 - DNA, 21 bp, synthetic construct
  misc_feature 1..21: note = Synthetic
  source 1..21: mol_type = other DNA
atggggtcttactatgttgcc

SEQ ID NO: 11137 - DNA, 21 bp, synthetic construct
  misc_feature 1..21: note = Synthetic
  source 1..21: mol_type = other DNA
atgggttcatctgaccagtcc

SEQ ID NO: 11138 - DNA, 21 bp, synthetic construct
  misc_feature 1..21: note = Synthetic
  source 1..21: mol_type = other DNA
atggtctcgatctcctgacct

SEQ ID NO: 11139 - DNA, 21 bp, synthetic construct
  misc_feature 1..21: note = Synthetic
  source 1..21: mol_type = other DNA
atggtcttccggttgcccccg

SEQ ID NO: 11140 - DNA, 21 bp, synthetic construct
  misc_feature 1..21: note = Synthetic
  source 1..21: mol_type = other DNA
atggtttttttttgttttttt

SEQ ID NO: 11141 - DNA, 21 bp, synthetic construct
  misc_feature 1..21: note = Synthetic
  source 1..21: mol_type = other DNA
atgtacacagtgtacaactct

SEQ ID NO: 11142 - DNA, 21 bp, synthetic construct
  misc_feature 1..21: note = Synthetic
  source 1..21: mol_type = other DNA
atgtccacaccattcaggccc

SEQ ID NO: 11143 - DNA, 21 bp, synthetic construct
  misc_feature 1..21: note = Synthetic
  source 1..21: mol_type = other DNA
atgtccctggccagcagcatg

SEQ ID NO: 11144 - DNA, 21 bp, synthetic construct
  misc_feature 1..21: note = Synthetic
  source 1..21: mol_type = other DNA
atgtccttgcagtcatattcc

SEQ ID NO: 11145 - DNA, 21 bp, synthetic construct
  misc_feature 1..21: note = Synthetic
  source 1..21: mol_type = other DNA
atgtcgcggaggcggctccgg

SEQ ID NO: 11146 - DNA, 21 bp, synthetic construct
  misc_feature 1..21: note = Synthetic
  source 1..21: mol_type = other DNA
atgtctcctgggtggccactg

SEQ ID NO: 11147 - DNA, 21 bp, synthetic construct
  misc_feature 1..21: note = Synthetic
  source 1..21: mol_type = other DNA
atgtctctgctgatgacggtg

SEQ ID NO: 11148 - DNA, 21 bp, synthetic construct
  misc_feature 1..21: note = Synthetic
  source 1..21: mol_type = other DNA
atgtggacctcatcctctgtg

SEQ ID NO: 11149 - DNA, 21 bp, synthetic construct
  misc_feature 1..21: note = Synthetic
  source 1..21: mol_type = other DNA
atgtgtgtatatatatatata

SEQ ID NO: 11150 - DNA, 21 bp, synthetic construct
  misc_feature 1..21: note = Synthetic
  source 1..21: mol_type = other DNA
atgttcacgccacgtcatcct

SEQ ID NO: 11151 - DNA, 21 bp, synthetic construct
  misc_feature 1..21: note = Synthetic
  source 1..21: mol_type = other DNA
atgttcttaagccgccagttc

SEQ ID NO: 11152 - DNA, 21 bp, synthetic construct
  misc_feature 1..21: note = Synthetic
  source 1..21: mol_type = other DNA
atgttgcagactttgtccagg

SEQ ID NO: 11153 - DNA, 21 bp, synthetic construct
  misc_feature 1..21: note = Synthetic
  source 1..21: mol_type = other DNA
atgttgcccaggctggaaagc

SEQ ID NO: 11154 - DNA, 21 bp, synthetic construct
  misc_feature 1..21: note = Synthetic
  source 1..21: mol_type = other DNA
atgttgctgtggatccagtcc

SEQ ID NO: 11155 - DNA, 21 bp, synthetic construct
  misc_feature 1..21: note = Synthetic
  source 1..21: mol_type = other DNA
atgtttgaggattgtgtcacg

SEQ ID NO: 11156 - DNA, 21 bp, synthetic construct
  misc_feature 1..21: note = Synthetic
  source 1..21: mol_type = other DNA
atgttttaaacacatacccat

SEQ ID NO: 11157 - DNA, 21 bp, synthetic construct
  misc_feature 1..21: note = Synthetic
  source 1..21: mol_type = other DNA
atgttttcagtcaccagcgag

SEQ ID NO: 11158 - DNA, 21 bp, synthetic construct
  misc_feature 1..21: note = Synthetic
  source 1..21: mol_type = other DNA
attaacgcagccaacttcatc

SEQ ID NO: 11159 - DNA, 21 bp, synthetic construct
  misc_feature 1..21: note = Synthetic
  source 1..21: mol_type = other DNA
attaagggtgaccagtgactc

SEQ ID NO: 11160 - DNA, 21 bp, synthetic construct
  misc_feature 1..21: note = Synthetic
  source 1..21: mol_type = other DNA
attacaggcgtgagccactgc

SEQ ID NO: 11161 - DNA, 21 bp, synthetic construct
  misc_feature 1..21: note = Synthetic
  source 1..21: mol_type = other DNA
attacaggcgtgaggcacctg

SEQ ID NO: 11162 - DNA, 21 bp, synthetic construct
  misc_feature 1..21: note = Synthetic
  source 1..21: mol_type = other DNA
attcacgatcacggctttgaa

SEQ ID NO: 11163 - DNA, 21 bp, synthetic construct
  misc_feature 1..21: note = Synthetic
  source 1..21: mol_type = other DNA
attcagccagatcatttccga

SEQ ID NO: 11164 - DNA, 21 bp, synthetic construct
  misc_feature 1..21: note = Synthetic
  source 1..21: mol_type = other DNA
attcaggccccctttcttgat

SEQ ID NO: 11165 - DNA, 21 bp, synthetic construct
  misc_feature 1..21: note = Synthetic
  source 1..21: mol_type = other DNA
attcaggctacaaaaaccttc

SEQ ID NO: 11166 - DNA, 21 bp, synthetic construct
  misc_feature 1..21: note = Synthetic
  source 1..21: mol_type = other DNA
attcattgacacgggctttcc

SEQ ID NO: 11167 - DNA, 21 bp, synthetic construct
  misc_feature 1..21: note = Synthetic
  source 1..21: mol_type = other DNA
attcattttttaagagatggg

SEQ ID NO: 11168 - DNA, 21 bp, synthetic construct
  misc_feature 1..21: note = Synthetic
  source 1..21: mol_type = other DNA
attcccggtcacactgccggc

SEQ ID NO: 11169 - DNA, 21 bp, synthetic construct
  misc_feature 1..21: note = Synthetic
  source 1..21: mol_type = other DNA
attcgccgctgtgacacttga

SEQ ID NO: 11170 - DNA, 21 bp, synthetic construct
  misc_feature 1..21: note = Synthetic
  source 1..21: mol_type = other DNA
attcgggggtgacagggcaaa

SEQ ID NO: 11171 - DNA, 21 bp, synthetic construct
  misc_feature 1..21: note = Synthetic
  source 1..21: mol_type = other DNA
attcgtcagggcgacaggtgg

SEQ ID NO: 11172 - DNA, 21 bp, synthetic construct
  misc_feature 1..21: note = Synthetic
  source 1..21: mol_type = other DNA
attcgttggtcccgcactctt

SEQ ID NO: 11173 - DNA, 21 bp, synthetic construct
  misc_feature 1..21: note = Synthetic
  source 1..21: mol_type = other DNA
attctattgctggccacctcc

SEQ ID NO: 11174 - DNA, 21 bp, synthetic construct
  misc_feature 1..21: note = Synthetic
  source 1..21: mol_type = other DNA
attctcccaaaaagcgttgca

SEQ ID NO: 11175 - DNA, 21 bp, synthetic construct
  misc_feature 1..21: note = Synthetic
  source 1..21: mol_type = other DNA
attctcctgcctcagcctccc

SEQ ID NO: 11176 - DNA, 21 bp, synthetic construct
  misc_feature 1..21: note = Synthetic
  source 1..21: mol_type = other DNA
attctctgggacaggtcagac

SEQ ID NO: 11177 - DNA, 21 bp, synthetic construct
  misc_feature 1..21: note = Synthetic
  source 1..21: mol_type = other DNA
attctgaggcaacgtttcaac

SEQ ID NO: 11178 - DNA, 21 bp, synthetic construct
  misc_feature 1..21: note = Synthetic
  source 1..21: mol_type = other DNA
attgacacgggctttccctgg

SEQ ID NO: 11179 - DNA, 21 bp, synthetic construct
  misc_feature 1..21: note = Synthetic
  source 1..21: mol_type = other DNA
attgatcacagtaagacattc

SEQ ID NO: 11180 - DNA, 21 bp, synthetic construct
  misc_feature 1..21: note = Synthetic
  source 1..21: mol_type = other DNA
attgcagacgtgggaacagcc

SEQ ID NO: 11181 - DNA, 21 bp, synthetic construct
  misc_feature 1..21: note = Synthetic
  source 1..21: mol_type = other DNA
attgcatgggcactgtccgaa

SEQ ID NO: 11182 - DNA, 21 bp, synthetic construct
  misc_feature 1..21: note = Synthetic
  source 1..21: mol_type = other DNA
attgccaatcccttgtgacat

SEQ ID NO: 11183 - DNA, 21 bp, synthetic construct
  misc_feature 1..21: note = Synthetic
  source 1..21: mol_type = other DNA
attgctcagggtggtcctctc

SEQ ID NO: 11184 - DNA, 21 bp, synthetic construct
  misc_feature 1..21: note = Synthetic
  source 1..21: mol_type = other DNA
attgctggccacctccgtgtc

SEQ ID NO: 11185 - DNA, 21 bp, synthetic construct
  misc_feature 1..21: note = Synthetic
  source 1..21: mol_type = other DNA
attgggccactgaatgttttc

SEQ ID NO: 11186 - DNA, 21 bp, synthetic construct
  misc_feature 1..21: note = Synthetic
  source 1..21: mol_type = other DNA
attggggaagtgaatggcttg

SEQ ID NO: 11187 - DNA, 21 bp, synthetic construct
  misc_feature 1..21: note = Synthetic
  source 1..21: mol_type = other DNA
attggtggatgaggcagggcc

SEQ ID NO: 11188 - DNA, 21 bp, synthetic construct
  misc_feature 1..21: note = Synthetic
  source 1..21: mol_type = other DNA
attgtcactatctccaccgtg

SEQ ID NO: 11189 - DNA, 21 bp, synthetic construct
  misc_feature 1..21: note = Synthetic
  source 1..21: mol_type = other DNA
attgtgtcacggtggagagaa

SEQ ID NO: 11190 - DNA, 21 bp, synthetic construct
  misc_feature 1..21: note = Synthetic
  source 1..21: mol_type = other DNA
atttaagaaatttaattgatc

SEQ ID NO: 11191 - DNA, 21 bp, synthetic construct
  misc_feature 1..21: note = Synthetic
  source 1..21: mol_type = other DNA
atttaattgatcacagtaaga

SEQ ID NO: 11192 - DNA, 21 bp, synthetic construct
  misc_feature 1..21: note = Synthetic
  source 1..21: mol_type = other DNA
atttacgtgctccgaaaccag

SEQ ID NO: 11193 - DNA, 21 bp, synthetic construct
  misc_feature 1..21: note = Synthetic
  source 1..21: mol_type = other DNA
atttatttatttttttatagt

SEQ ID NO: 11194 - DNA, 21 bp, synthetic construct
  misc_feature 1..21: note = Synthetic
  source 1..21: mol_type = other DNA
atttatttttttatagttgta

SEQ ID NO: 11195 - DNA, 21 bp, synthetic construct
  misc_feature 1..21: note = Synthetic
  source 1..21: mol_type = other DNA
atttcagaaagaacctgaagt

SEQ ID NO: 11196 - DNA, 21 bp, synthetic construct
  misc_feature 1..21: note = Synthetic
  source 1..21: mol_type = other DNA
atttcagaggcaataaccccc

SEQ ID NO: 11197 - DNA, 21 bp, synthetic construct
  misc_feature 1..21: note = Synthetic
  source 1..21: mol_type = other DNA
atttccagccccagggcccca

SEQ ID NO: 11198 - DNA, 21 bp, synthetic construct
  misc_feature 1..21: note = Synthetic
  source 1..21: mol_type = other DNA
atttcccgtcttggcactgga

SEQ ID NO: 11199 - DNA, 21 bp, synthetic construct
  misc_feature 1..21: note = Synthetic
  source 1..21: mol_type = other DNA
atttccgacgccatgaatccc

SEQ ID NO: 11200 - DNA, 21 bp, synthetic construct
  misc_feature 1..21: note = Synthetic
  source 1..21: mol_type = other DNA
atttcctctgccagcaacgtc

SEQ ID NO: 11201 - DNA, 21 bp, synthetic construct
  misc_feature 1..21: note = Synthetic
  source 1..21: mol_type = other DNA
atttctgaaatagggtcttca

SEQ ID NO: 11202 - DNA, 21 bp, synthetic construct
  misc_feature 1..21: note = Synthetic
  source 1..21: mol_type = other DNA
atttgcaggtgacagacaagc

SEQ ID NO: 11203 - DNA, 21 bp, synthetic construct
  misc_feature 1..21: note = Synthetic
  source 1..21: mol_type = other DNA
atttgcatagaagtggaagca

SEQ ID NO: 11204 - DNA, 21 bp, synthetic construct
  misc_feature 1..21: note = Synthetic
  source 1..21: mol_type = other DNA
atttggtgaatgagtttggtc

SEQ ID NO: 11205 - DNA, 21 bp, synthetic construct
  misc_feature 1..21: note = Synthetic
  source 1..21: mol_type = other DNA
atttgtccttgcagtcggggc

SEQ ID NO: 11206 - DNA, 21 bp, synthetic construct
  misc_feature 1..21: note = Synthetic
  source 1..21: mol_type = other DNA
attttatatatatgtgtgtat

SEQ ID NO: 11207 - DNA, 21 bp, synthetic construct
  misc_feature 1..21: note = Synthetic
  source 1..21: mol_type = other DNA
atttttaactttttggttttt

SEQ ID NO: 11208 - DNA, 21 bp, synthetic construct
  misc_feature 1..21: note = Synthetic
  source 1..21: mol_type = other DNA
atttttagtagagacggggtt

SEQ ID NO: 11209 - DNA, 21 bp, synthetic construct
  misc_feature 1..21: note = Synthetic
  source 1..21: mol_type = other DNA
attttttaagagatggggtct

SEQ ID NO: 11210 - DNA, 21 bp, synthetic construct
  misc_feature 1..21: note = Synthetic
  source 1..21: mol_type = other DNA
attttttgtatttttagtaga

SEQ ID NO: 11211 - DNA, 21 bp, synthetic construct
  misc_feature 1..21: note = Synthetic
  source 1..21: mol_type = other DNA
atttttttatagttgtatttc

SEQ ID NO: 11212 - DNA, 21 bp, synthetic construct
  misc_feature 1..21: note = Synthetic
  source 1..21: mol_type = other DNA
caaaaaatccccactatctgt

SEQ ID NO: 11213 - DNA, 21 bp, synthetic construct
  misc_feature 1..21: note = Synthetic
  source 1..21: mol_type = other DNA
caaaaaccttctatacagtgg

SEQ ID NO: 11214 - DNA, 21 bp, synthetic construct
  misc_feature 1..21: note = Synthetic
  source 1..21: mol_type = other DNA
caaaaagcgttgcacacagtc

SEQ ID NO: 11215 - DNA, 21 bp, synthetic construct
  misc_feature 1..21: note = Synthetic
  source 1..21: mol_type = other DNA
caaaaataaatagattttata

SEQ ID NO: 11216 - DNA, 21 bp, synthetic construct
  misc_feature 1..21: note = Synthetic
  source 1..21: mol_type = other DNA
caaaacttcctggagagaaat

SEQ ID NO: 11217 - DNA, 21 bp, synthetic construct
  misc_feature 1..21: note = Synthetic
  source 1..21: mol_type = other DNA
caaaataataacacaaatgcc

SEQ ID NO: 11218 - DNA, 21 bp, synthetic construct
  misc_feature 1..21: note = Synthetic
  source 1..21: mol_type = other DNA
caaaatactttgtcctcaaag

SEQ ID NO: 11219 - DNA, 21 bp, synthetic construct
  misc_feature 1..21: note = Synthetic
  source 1..21: mol_type = other DNA
caaaatcccaacccaagccat

SEQ ID NO: 11220 - DNA, 21 bp, synthetic construct
  misc_feature 1..21: note = Synthetic
  source 1..21: mol_type = other DNA
caaacataacaaaaaatcccc

SEQ ID NO: 11221 - DNA, 21 bp, synthetic construct
  misc_feature 1..21: note = Synthetic
  source 1..21: mol_type = other DNA
caaaccatcctcccacctcag

SEQ ID NO: 11222 - DNA, 21 bp, synthetic construct
  misc_feature 1..21: note = Synthetic
  source 1..21: mol_type = other DNA
caaacccacctcgaaagacac

SEQ ID NO: 11223 - DNA, 21 bp, synthetic construct
  misc_feature 1..21: note = Synthetic
  source 1..21: mol_type = other DNA
caaacgatccagactggagga

SEQ ID NO: 11224 - DNA, 21 bp, synthetic construct
  misc_feature 1..21: note = Synthetic
  source 1..21: mol_type = other DNA
caaagacggccaaggagaagg

SEQ ID NO: 11225 - DNA, 21 bp, synthetic construct
  misc_feature 1..21: note = Synthetic
  source 1..21: mol_type = other DNA
caaagctctggcaggcaatgc

SEQ ID NO: 11226 - DNA, 21 bp, synthetic construct
  misc_feature 1..21: note = Synthetic
  source 1..21: mol_type = other DNA
caaaggaagacgaggagcacg

SEQ ID NO: 11227 - DNA, 21 bp, synthetic construct
  misc_feature 1..21: note = Synthetic
  source 1..21: mol_type = other DNA
caaaggaagacgaggagcact

SEQ ID NO: 11228 - DNA, 21 bp, synthetic construct
  misc_feature 1..21: note = Synthetic
  source 1..21: mol_type = other DNA
caaaggctaacctggctgtct

SEQ ID NO: 11229 - DNA, 21 bp, synthetic construct
  misc_feature 1..21: note = Synthetic
  source 1..21: mol_type = other DNA
caaagtgcaaacataacaaaa

SEQ ID NO: 11230 - DNA, 21 bp, synthetic construct
  misc_feature 1..21: note = Synthetic
  source 1..21: mol_type = other DNA
caaagtgctgggattacaggc

SEQ ID NO: 11231 - DNA, 21 bp, synthetic construct
  misc_feature 1..21: note = Synthetic
  source 1..21: mol_type = other DNA
caaagttgatgctgttgatgt

SEQ ID NO: 11232 - DNA, 21 bp, synthetic construct
  misc_feature 1..21: note = Synthetic
  source 1..21: mol_type = other DNA
caaataatctttgtacataaa

SEQ ID NO: 11233 - DNA, 21 bp, synthetic construct
  misc_feature 1..21: note = Synthetic
  source 1..21: mol_type = other DNA
caaatacagcaaccagggttt

SEQ ID NO: 11234 - DNA, 21 bp, synthetic construct
  misc_feature 1..21: note = Synthetic
  source 1..21: mol_type = other DNA
caaatgccaaatgtacacagt

SEQ ID NO: 11235 - DNA, 21 bp, synthetic construct
  misc_feature 1..21: note = Synthetic
  source 1..21: mol_type = other DNA
caaatgcctgagctcaaacca

SEQ ID NO: 11236 - DNA, 21 bp, synthetic construct
  misc_feature 1..21: note = Synthetic
  source 1..21: mol_type = other DNA
caaatgtacacagtgtacaac

SEQ ID NO: 11237 - DNA, 21 bp, synthetic construct
  misc_feature 1..21: note = Synthetic
  source 1..21: mol_type = other DNA
caaatgtggacctcatcctct

SEQ ID NO: 11238 - DNA, 21 bp, synthetic construct
  misc_feature 1..21: note = Synthetic
  source 1..21: mol_type = other DNA
caaattcattttttaagagat

SEQ ID NO: 11239 - DNA, 21 bp, synthetic construct
  misc_feature 1..21: note = Synthetic
  source 1..21: mol_type = other DNA
caacaagttgacatcggaacc

SEQ ID NO: 11240 - DNA, 21 bp, synthetic construct
  misc_feature 1..21: note = Synthetic
  source 1..21: mol_type = other DNA
caacacacacgacagaaaaca

SEQ ID NO: 11241 - DNA, 21 bp, synthetic construct
  misc_feature 1..21: note = Synthetic
  source 1..21: mol_type = other DNA
caacagagacagtgcccagga

SEQ ID NO: 11242 - DNA, 21 bp, synthetic construct
  misc_feature 1..21: note = Synthetic
  source 1..21: mol_type = other DNA
caacagtaacacggcgatttc

SEQ ID NO: 11243 - DNA, 21 bp, synthetic construct
  misc_feature 1..21: note = Synthetic
  source 1..21: mol_type = other DNA
caaccaatatacaaagtgcaa

SEQ ID NO: 11244 - DNA, 21 bp, synthetic construct
  misc_feature 1..21: note = Synthetic
  source 1..21: mol_type = other DNA
caaccagggtttgcaaaaata

SEQ ID NO: 11245 - DNA, 21 bp, synthetic construct
  misc_feature 1..21: note = Synthetic
  source 1..21: mol_type = other DNA
caacccaagccattgcatggg

SEQ ID NO: 11246 - DNA, 21 bp, synthetic construct
  misc_feature 1..21: note = Synthetic
  source 1..21: mol_type = other DNA
caacccagtagaggcggccac

SEQ ID NO: 11247 - DNA, 21 bp, synthetic construct
  misc_feature 1..21: note = Synthetic
  source 1..21: mol_type = other DNA
caacctccacctcctgggctc

SEQ ID NO: 11248 - DNA, 21 bp, synthetic construct
  misc_feature 1..21: note = Synthetic
  source 1..21: mol_type = other DNA
caacctcgtaaggaaccgagg

SEQ ID NO: 11249 - DNA, 21 bp, synthetic construct
  misc_feature 1..21: note = Synthetic
  source 1..21: mol_type = other DNA
caacctgcccctctctgtccc

SEQ ID NO: 11250 - DNA, 21 bp, synthetic construct
  misc_feature 1..21: note = Synthetic
  source 1..21: mol_type = other DNA
caacgacaagattggggaagt

SEQ ID NO: 11251 - DNA, 21 bp, synthetic construct
  misc_feature 1..21: note = Synthetic
  source 1..21: mol_type = other DNA
caacggggacatcattctccc

SEQ ID NO: 11252 - DNA, 21 bp, synthetic construct
  misc_feature 1..21: note = Synthetic
  source 1..21: mol_type = other DNA
caacgtcgcccagagcttggt

SEQ ID NO: 11253 - DNA, 21 bp, synthetic construct
  misc_feature 1..21: note = Synthetic
  source 1..21: mol_type = other DNA
caacgtttcaacctcgtaagg

SEQ ID NO: 11254 - DNA, 21 bp, synthetic construct
  misc_feature 1..21: note = Synthetic
  source 1..21: mol_type = other DNA
caactcctgaactcaagtgat

SEQ ID NO: 11255 - DNA, 21 bp, synthetic construct
  misc_feature 1..21: note = Synthetic
  source 1..21: mol_type = other DNA
caactctgaactgagaaagtg

SEQ ID NO: 11256 - DNA, 21 bp, synthetic construct
  misc_feature 1..21: note = Synthetic
  source 1..21: mol_type = other DNA
caacttcatcgctcatgtcct

SEQ ID NO: 11257 - DNA, 21 bp, synthetic construct
  misc_feature 1..21: note = Synthetic
  source 1..21: mol_type = other DNA
caagatggtcttccggttgcc

SEQ ID NO: 11258 - DNA, 21 bp, synthetic construct
  misc_feature 1..21: note = Synthetic
  source 1..21: mol_type = other DNA
caagattggggaagtgaatgg

SEQ ID NO: 11259 - DNA, 21 bp, synthetic construct
  misc_feature 1..21: note = Synthetic
  source 1..21: mol_type = other DNA
caagcacgtctcctgggactc

SEQ ID NO: 11260 - DNA, 21 bp, synthetic construct
  misc_feature 1..21: note = Synthetic
  source 1..21: mol_type = other DNA
caagcagtcccggtctgagtc

SEQ ID NO: 11261 - DNA, 21 bp, synthetic construct
  misc_feature 1..21: note = Synthetic
  source 1..21: mol_type = other DNA
caagcattcgttggtcccgca

SEQ ID NO: 11262 - DNA, 21 bp, synthetic construct
  misc_feature 1..21: note = Synthetic
  source 1..21: mol_type = other DNA
caagccattgcatgggcactg

SEQ ID NO: 11263 - DNA, 21 bp, synthetic construct
  misc_feature 1..21: note = Synthetic
  source 1..21: mol_type = other DNA
caagctccgcttcccgggttc

SEQ ID NO: 11264 - DNA, 21 bp, synthetic construct
  misc_feature 1..21: note = Synthetic
  source 1..21: mol_type = other DNA
caagctgggtgctgcagatca

SEQ ID NO: 11265 - DNA, 21 bp, synthetic construct
  misc_feature 1..21: note = Synthetic
  source 1..21: mol_type = other DNA
caaggagaaggggtgggccag

SEQ ID NO: 11266 - DNA, 21 bp, synthetic construct
  misc_feature 1..21: note = Synthetic
  source 1..21: mol_type = other DNA
caaggagaccacgggaatgga

SEQ ID NO: 11267 - DNA, 21 bp, synthetic construct
  misc_feature 1..21: note = Synthetic
  source 1..21: mol_type = other DNA
caaggaggggcggggagattc

SEQ ID NO: 11268 - DNA, 21 bp, synthetic construct
  misc_feature 1..21: note = Synthetic
  source 1..21: mol_type = other DNA
caaggccggcgaggtctcagg

SEQ ID NO: 11269 - DNA, 21 bp, synthetic construct
  misc_feature 1..21: note = Synthetic
  source 1..21: mol_type = other DNA
caaggcgacggtccagcgcaa

SEQ ID NO: 11270 - DNA, 21 bp, synthetic construct
  misc_feature 1..21: note = Synthetic
  source 1..21: mol_type = other DNA
caaggcttgcatagaagaggt

SEQ ID NO: 11271 - DNA, 21 bp, synthetic construct
  misc_feature 1..21: note = Synthetic
  source 1..21: mol_type = other DNA
caaggtaaccgggtgtctcag

SEQ ID NO: 11272 - DNA, 21 bp, synthetic construct
  misc_feature 1..21: note = Synthetic
  source 1..21: mol_type = other DNA
caaggtggggacggaggtgtc

SEQ ID NO: 11273 - DNA, 21 bp, synthetic construct
  misc_feature 1..21: note = Synthetic
  source 1..21: mol_type = other DNA
caagtagctgggatcacaggc

SEQ ID NO: 11274 - DNA, 21 bp, synthetic construct
  misc_feature 1..21: note = Synthetic
  source 1..21: mol_type = other DNA
caagtgatccagctcagcctc

SEQ ID NO: 11275 - DNA, 21 bp, synthetic construct
  misc_feature 1..21: note = Synthetic
  source 1..21: mol_type = other DNA
caagttgacatcggaacctgt

SEQ ID NO: 11276 - DNA, 21 bp, synthetic construct
  misc_feature 1..21: note = Synthetic
  source 1..21: mol_type = other DNA
caataaccccctacacagggc

SEQ ID NO: 11277 - DNA, 21 bp, synthetic construct
  misc_feature 1..21: note = Synthetic
  source 1..21: mol_type = other DNA
caatatacaaagtgcaaacat

SEQ ID NO: 11278 - DNA, 21 bp, synthetic construct
  misc_feature 1..21: note = Synthetic
  source 1..21: mol_type = other DNA
caatcccttgtgacatcttca

SEQ ID NO: 11279 - DNA, 21 bp, synthetic construct
  misc_feature 1..21: note = Synthetic
  source 1..21: mol_type = other DNA
caatctcggctcactgcaagc

SEQ ID NO: 11280 - DNA, 21 bp, synthetic construct
  misc_feature 1..21: note = Synthetic
  source 1..21: mol_type = other DNA
caatgctttggtcttctctgt

SEQ ID NO: 11281 - DNA, 21 bp, synthetic construct
  misc_feature 1..21: note = Synthetic
  source 1..21: mol_type = other DNA
caatggacagagccctcacgc

SEQ ID NO: 11282 - DNA, 21 bp, synthetic construct
  misc_feature 1..21: note = Synthetic
  source 1..21: mol_type = other DNA
caatggcagttctcgatattc

SEQ ID NO: 11283 - DNA, 21 bp, synthetic construct
  misc_feature 1..21: note = Synthetic
  source 1..21: mol_type = other DNA
caattgccaatcccttgtgac

SEQ ID NO: 11284 - DNA, 21 bp, synthetic construct
  misc_feature 1..21: note = Synthetic
  source 1..21: mol_type = other DNA
caatttccagccccagggccc

SEQ ID NO: 11285 - DNA, 21 bp, synthetic construct
  misc_feature 1..21: note = Synthetic
  source 1..21: mol_type = other DNA
cacaaatgccaaatgtacaca

SEQ ID NO: 11286 - DNA, 21 bp, synthetic construct
  misc_feature 1..21: note = Synthetic
  source 1..21: mol_type = other DNA
cacacacgacagaaaacagtg

SEQ ID NO: 11287 - DNA, 21 bp, synthetic construct
  misc_feature 1..21: note = Synthetic
  source 1..21: mol_type = other DNA
cacacagctgcccccgagacc

SEQ ID NO: 11288 - DNA, 21 bp, synthetic construct
  misc_feature 1..21: note = Synthetic
  source 1..21: mol_type = other DNA
cacacagtccagttcgtgcaa

SEQ ID NO: 11289 - DNA, 21 bp, synthetic construct
  misc_feature 1..21: note = Synthetic
  source 1..21: mol_type = other DNA
cacaccagttcactcctcttg

SEQ ID NO: 11290 - DNA, 21 bp, synthetic construct
  misc_feature 1..21: note = Synthetic
  source 1..21: mol_type = other DNA
cacaccattcaggcccccttt

SEQ ID NO: 11291 - DNA, 21 bp, synthetic construct
  misc_feature 1..21: note = Synthetic
  source 1..21: mol_type = other DNA
cacaccattctcctgcctcag

SEQ ID NO: 11292 - DNA, 21 bp, synthetic construct
  misc_feature 1..21: note = Synthetic
  source 1..21: mol_type = other DNA
cacacctgggtgcaggccacg

SEQ ID NO: 11293 - DNA, 21 bp, synthetic construct
  misc_feature 1..21: note = Synthetic
  source 1..21: mol_type = other DNA
cacacgacagaaaacagtgca

SEQ ID NO: 11294 - DNA, 21 bp, synthetic construct
  misc_feature 1..21: note = Synthetic
  source 1..21: mol_type = other DNA
cacactgccggctgccatgga

SEQ ID NO: 11295 - DNA, 21 bp, synthetic construct
  misc_feature 1..21: note = Synthetic
  source 1..21: mol_type = other DNA
cacactggcacttgtagccac

SEQ ID NO: 11296 - DNA, 21 bp, synthetic construct
  misc_feature 1..21: note = Synthetic
  source 1..21: mol_type = other DNA
cacagacgaactgccgagaga

SEQ ID NO: 11297 - DNA, 21 bp, synthetic construct
  misc_feature 1..21: note = Synthetic
  source 1..21: mol_type = other DNA
cacagagcacagcggaaaccg

SEQ ID NO: 11298 - DNA, 21 bp, synthetic construct
  misc_feature 1..21: note = Synthetic
  source 1..21: mol_type = other DNA
cacagatactggcagccgcca

SEQ ID NO: 11299 - DNA, 21 bp, synthetic construct
  misc_feature 1..21: note = Synthetic
  source 1..21: mol_type = other DNA
cacagccagcccgtcgggggc

SEQ ID NO: 11300 - DNA, 21 bp, synthetic construct
  misc_feature 1..21: note = Synthetic
  source 1..21: mol_type = other DNA
cacagccttgcaggccttcgt

SEQ ID NO: 11301 - DNA, 21 bp, synthetic construct
  misc_feature 1..21: note = Synthetic
  source 1..21: mol_type = other DNA
cacagcgcagttttcctcgtc

SEQ ID NO: 11302 - DNA, 21 bp, synthetic construct
  misc_feature 1..21: note = Synthetic
  source 1..21: mol_type = other DNA
cacagcgccagctggagtgga

SEQ ID NO: 11303 - DNA, 21 bp, synthetic construct
  misc_feature 1..21: note = Synthetic
  source 1..21: mol_type = other DNA
cacagcggaaaccggggactt

SEQ ID NO: 11304 - DNA, 21 bp, synthetic construct
  misc_feature 1..21: note = Synthetic
  source 1..21: mol_type = other DNA
cacagctgaagtccccggatt

SEQ ID NO: 11305 - DNA, 21 bp, synthetic construct
  misc_feature 1..21: note = Synthetic
  source 1..21: mol_type = other DNA
cacagctgcccccgagaccag

SEQ ID NO: 11306 - DNA, 21 bp, synthetic construct
  misc_feature 1..21: note = Synthetic
  source 1..21: mol_type = other DNA
cacagctgggggatgcaggtg

SEQ ID NO: 11307 - DNA, 21 bp, synthetic construct
  misc_feature 1..21: note = Synthetic
  source 1..21: mol_type = other DNA
cacaggacagccttgctcgtc

SEQ ID NO: 11308 - DNA, 21 bp, synthetic construct
  misc_feature 1..21: note = Synthetic
  source 1..21: mol_type = other DNA
cacaggcacgtgccaccgtac

SEQ ID NO: 11309 - DNA, 21 bp, synthetic construct
  misc_feature 1..21: note = Synthetic
  source 1..21: mol_type = other DNA
cacaggcactcgtagccgatc

SEQ ID NO: 11310 - DNA, 21 bp, synthetic construct
  misc_feature 1..21: note = Synthetic
  source 1..21: mol_type = other DNA
cacagggccccgagaatagtc

SEQ ID NO: 11311 - DNA, 21 bp, synthetic construct
  misc_feature 1..21: note = Synthetic
  source 1..21: mol_type = other DNA
cacaggtgagcaccgggcagg

SEQ ID NO: 11312 - DNA, 21 bp, synthetic construct
  misc_feature 1..21: note = Synthetic
  source 1..21: mol_type = other DNA
cacagtaagacattcaggcta

SEQ ID NO: 11313 - DNA, 21 bp, synthetic construct
  misc_feature 1..21: note = Synthetic
  source 1..21: mol_type = other DNA
cacagtccagttcgtgcaaat

SEQ ID NO: 11314 - DNA, 21 bp, synthetic construct
  misc_feature 1..21: note = Synthetic
  source 1..21: mol_type = other DNA
cacagtgtacaactctgaact

SEQ ID NO: 11315 - DNA, 21 bp, synthetic construct
  misc_feature 1..21: note = Synthetic
  source 1..21: mol_type = other DNA
cacagtgttttgtccctgggg

SEQ ID NO: 11316 - DNA, 21 bp, synthetic construct
  misc_feature 1..21: note = Synthetic
  source 1..21: mol_type = other DNA
cacatacccatcaacgacaag

SEQ ID NO: 11317 - DNA, 21 bp, synthetic construct
  misc_feature 1..21: note = Synthetic
  source 1..21: mol_type = other DNA
cacattaacgcagccaacttc

SEQ ID NO: 11318 - DNA, 21 bp, synthetic construct
  misc_feature 1..21: note = Synthetic
  source 1..21: mol_type = other DNA
caccacgatggcccttggctt

SEQ ID NO: 11319 - DNA, 21 bp, synthetic construct
  misc_feature 1..21: note = Synthetic
  source 1..21: mol_type = other DNA
caccacgcccggctaattttt

SEQ ID NO: 11320 - DNA, 21 bp, synthetic construct
  misc_feature 1..21: note = Synthetic
  source 1..21: mol_type = other DNA
caccacggattcagccagatc

SEQ ID NO: 11321 - DNA, 21 bp, synthetic construct
  misc_feature 1..21: note = Synthetic
  source 1..21: mol_type = other DNA
caccagcgagtagatgtccac

SEQ ID NO: 11322 - DNA, 21 bp, synthetic construct
  misc_feature 1..21: note = Synthetic
  source 1..21: mol_type = other DNA
caccagctggaagccgtcggg

SEQ ID NO: 11323 - DNA, 21 bp, synthetic construct
  misc_feature 1..21: note = Synthetic
  source 1..21: mol_type = other DNA
caccaggctggtgtcctgaca

SEQ ID NO: 11324 - DNA, 21 bp, synthetic construct
  misc_feature 1..21: note = Synthetic
  source 1..21: mol_type = other DNA
caccagttcactcctcttggc

SEQ ID NO: 11325 - DNA, 21 bp, synthetic construct
  misc_feature 1..21: note = Synthetic
  source 1..21: mol_type = other DNA
caccatcacagcgccagctgg

SEQ ID NO: 11326 - DNA, 21 bp, synthetic construct
  misc_feature 1..21: note = Synthetic
  source 1..21: mol_type = other DNA
caccatgcatggttttttttt

SEQ ID NO: 11327 - DNA, 21 bp, synthetic construct
  misc_feature 1..21: note = Synthetic
  source 1..21: mol_type = other DNA
caccattcaggccccctttct

SEQ ID NO: 11328 - DNA, 21 bp, synthetic construct
  misc_feature 1..21: note = Synthetic
  source 1..21: mol_type = other DNA
caccattctcctgcctcagcc

SEQ ID NO: 11329 - DNA, 21 bp, synthetic construct
  misc_feature 1..21: note = Synthetic
  source 1..21: mol_type = other DNA
cacccatctcccagaagccac

SEQ ID NO: 11330 - DNA, 21 bp, synthetic construct
  misc_feature 1..21: note = Synthetic
  source 1..21: mol_type = other DNA
cacccgcctcggcctcccaaa

SEQ ID NO: 11331 - DNA, 21 bp, synthetic construct
  misc_feature 1..21: note = Synthetic
  source 1..21: mol_type = other DNA
caccctccaggttcacgcaga

SEQ ID NO: 11332 - DNA, 21 bp, synthetic construct
  misc_feature 1..21: note = Synthetic
  source 1..21: mol_type = other DNA
caccgggcaggaggcctcgtc

SEQ ID NO: 11333 - DNA, 21 bp, synthetic construct
  misc_feature 1..21: note = Synthetic
  source 1..21: mol_type = other DNA
caccgtacccagctgattttt

SEQ ID NO: 11334 - DNA, 21 bp, synthetic construct
  misc_feature 1..21: note = Synthetic
  source 1..21: mol_type = other DNA
caccgtgcatgttttaaacac

SEQ ID NO: 11335 - DNA, 21 bp, synthetic construct
  misc_feature 1..21: note = Synthetic
  source 1..21: mol_type = other DNA
caccgtggtgagcccaggggt

SEQ ID NO: 11336 - DNA, 21 bp, synthetic construct
  misc_feature 1..21: note = Synthetic
  source 1..21: mol_type = other DNA
cacctcagcctcgccatgcct

SEQ ID NO: 11337 - DNA, 21 bp, synthetic construct
  misc_feature 1..21: note = Synthetic
  source 1..21: mol_type = other DNA
cacctccagaactgaggaatg

SEQ ID NO: 11338 - DNA, 21 bp, synthetic construct
  misc_feature 1..21: note = Synthetic
  source 1..21: mol_type = other DNA
cacctccgtgtccagagcgac

SEQ ID NO: 11339 - DNA, 21 bp, synthetic construct
  misc_feature 1..21: note = Synthetic
  source 1..21: mol_type = other DNA
cacctcctgggctcaggcgat

SEQ ID NO: 11340 - DNA, 21 bp, synthetic construct
  misc_feature 1..21: note = Synthetic
  source 1..21: mol_type = other DNA
cacctcgaaagacactgggtg

SEQ ID NO: 11341 - DNA, 21 bp, synthetic construct
  misc_feature 1..21: note = Synthetic
  source 1..21: mol_type = other DNA
cacctgggtgcaggccacgtg

SEQ ID NO: 11342 - DNA, 21 bp, synthetic construct
  misc_feature 1..21: note = Synthetic
  source 1..21: mol_type = other DNA
cacctgtgtctggccaaattc

SEQ ID NO: 11343 - DNA, 21 bp, synthetic construct
  misc_feature 1..21: note = Synthetic
  source 1..21: mol_type = other DNA
cacgacagaaaacagtgcaaa

SEQ ID NO: 11344 - DNA, 21 bp, synthetic construct
  misc_feature 1..21: note = Synthetic
  source 1..21: mol_type = other DNA
cacgacagcctcaaatgcctg

SEQ ID NO: 11345 - DNA, 21 bp, synthetic construct
  misc_feature 1..21: note = Synthetic
  source 1..21: mol_type = other DNA
cacgacctgctgtgtcctagc

SEQ ID NO: 11346 - DNA, 21 bp, synthetic construct
  misc_feature 1..21: note = Synthetic
  source 1..21: mol_type = other DNA
cacgaggaaaggaagaaacca

SEQ ID NO: 11347 - DNA, 21 bp, synthetic construct
  misc_feature 1..21: note = Synthetic
  source 1..21: mol_type = other DNA
cacgatcacggctttgaagtc

SEQ ID NO: 11348 - DNA, 21 bp, synthetic construct
  misc_feature 1..21: note = Synthetic
  source 1..21: mol_type = other DNA
cacgatggcccttggcttgga

SEQ ID NO: 11349 - DNA, 21 bp, synthetic construct
  misc_feature 1..21: note = Synthetic
  source 1..21: mol_type = other DNA
cacgatggggaggacaatgga

SEQ ID NO: 11350 - DNA, 21 bp, synthetic construct
  misc_feature 1..21: note = Synthetic
  source 1..21: mol_type = other DNA
cacgcagagctggctgcaggt

SEQ ID NO: 11351 - DNA, 21 bp, synthetic construct
  misc_feature 1..21: note = Synthetic
  source 1..21: mol_type = other DNA
cacgccacgtcatcctccaga

SEQ ID NO: 11352 - DNA, 21 bp, synthetic construct
  misc_feature 1..21: note = Synthetic
  source 1..21: mol_type = other DNA
cacgcccggctaattttttgt

SEQ ID NO: 11353 - DNA, 21 bp, synthetic construct
  misc_feature 1..21: note = Synthetic
  source 1..21: mol_type = other DNA
cacgcccttggtatccgcaac

SEQ ID NO: 11354 - DNA, 21 bp, synthetic construct
  misc_feature 1..21: note = Synthetic
  source 1..21: mol_type = other DNA
cacgcgggagtctgacggagg

SEQ ID NO: 11355 - DNA, 21 bp, synthetic construct
  misc_feature 1..21: note = Synthetic
  source 1..21: mol_type = other DNA
cacgctactgggcttcttctc

SEQ ID NO: 11356 - DNA, 21 bp, synthetic construct
  misc_feature 1..21: note = Synthetic
  source 1..21: mol_type = other DNA
cacgctctgtcacacagctgc

SEQ ID NO: 11357 - DNA, 21 bp, synthetic construct
  misc_feature 1..21: note = Synthetic
  source 1..21: mol_type = other DNA
cacggattcagccagatcatt

SEQ ID NO: 11358 - DNA, 21 bp, synthetic construct
  misc_feature 1..21: note = Synthetic
  source 1..21: mol_type = other DNA
cacggccaaggtaaccgggtg

SEQ ID NO: 11359 - DNA, 21 bp, synthetic construct
  misc_feature 1..21: note = Synthetic
  source 1..21: mol_type = other DNA
cacggcccccacagctgaagt

SEQ ID NO: 11360 - DNA, 21 bp, synthetic construct
  misc_feature 1..21: note = Synthetic
  source 1..21: mol_type = other DNA
cacggcgatttcagaaagaac

SEQ ID NO: 11361 - DNA, 21 bp, synthetic construct
  misc_feature 1..21: note = Synthetic
  source 1..21: mol_type = other DNA
cacggctttgaagtcccggtc

SEQ ID NO: 11362 - DNA, 21 bp, synthetic construct
  misc_feature 1..21: note = Synthetic
  source 1..21: mol_type = other DNA
cacgggaatggaagtgggtag

SEQ ID NO: 11363 - DNA, 21 bp, synthetic construct
  misc_feature 1..21: note = Synthetic
  source 1..21: mol_type = other DNA
cacgggctttccctggcctgg

SEQ ID NO: 11364 - DNA, 21 bp, synthetic construct
  misc_feature 1..21: note = Synthetic
  source 1..21: mol_type = other DNA
cacggtggagagaaactcaaa

SEQ ID NO: 11365 - DNA, 21 bp, synthetic construct
  misc_feature 1..21: note = Synthetic
  source 1..21: mol_type = other DNA
cacggttccctgcactggggg

SEQ ID NO: 11366 - DNA, 21 bp, synthetic construct
  misc_feature 1..21: note = Synthetic
  source 1..21: mol_type = other DNA
cacgtaaagacccctacagcg

SEQ ID NO: 11367 - DNA, 21 bp, synthetic construct
  misc_feature 1..21: note = Synthetic
  source 1..21: mol_type = other DNA
cacgtcatcctccagactgac

SEQ ID NO: 11368 - DNA, 21 bp, synthetic construct
  misc_feature 1..21: note = Synthetic
  source 1..21: mol_type = other DNA
cacgtctcctgggactcatca

SEQ ID NO: 11369 - DNA, 21 bp, synthetic construct
  misc_feature 1..21: note = Synthetic
  source 1..21: mol_type = other DNA
cacgtcttgggggagcacgtc

SEQ ID NO: 11370 - DNA, 21 bp, synthetic construct
  misc_feature 1..21: note = Synthetic
  source 1..21: mol_type = other DNA
cacgtcttggggggacagcct

SEQ ID NO: 11371 - DNA, 21 bp, synthetic construct
  misc_feature 1..21: note = Synthetic
  source 1..21: mol_type = other DNA
cacgtgccaccgtacccagct

SEQ ID NO: 11372 - DNA, 21 bp, synthetic construct
  misc_feature 1..21: note = Synthetic
  source 1..21: mol_type = other DNA
cacgtggctgaagatctcggc

SEQ ID NO: 11373 - DNA, 21 bp, synthetic construct
  misc_feature 1..21: note = Synthetic
  source 1..21: mol_type = other DNA
cacgtgtcctcacggccaagg

SEQ ID NO: 11374 - DNA, 21 bp, synthetic construct
  misc_feature 1..21: note = Synthetic
  source 1..21: mol_type = other DNA
cacgtgttagccaggatggtc

SEQ ID NO: 11375 - DNA, 21 bp, synthetic construct
  misc_feature 1..21: note = Synthetic
  source 1..21: mol_type = other DNA
cacgttcctcaggttggggat

SEQ ID NO: 11376 - DNA, 21 bp, synthetic construct
  misc_feature 1..21: note = Synthetic
  source 1..21: mol_type = other DNA
cacgttgactcctgagtttag

SEQ ID NO: 11377 - DNA, 21 bp, synthetic construct
  misc_feature 1..21: note = Synthetic
  source 1..21: mol_type = other DNA
cactaggtgggcggacataaa

SEQ ID NO: 11378 - DNA, 21 bp, synthetic construct
  misc_feature 1..21: note = Synthetic
  source 1..21: mol_type = other DNA
cactatctccaccgtggtgag

SEQ ID NO: 11379 - DNA, 21 bp, synthetic construct
  misc_feature 1..21: note = Synthetic
  source 1..21: mol_type = other DNA
cactatctgtacagggacgca

SEQ ID NO: 11380 - DNA, 21 bp, synthetic construct
  misc_feature 1..21: note = Synthetic
  source 1..21: mol_type = other DNA
cactcagcgctgccatcgcag

SEQ ID NO: 11381 - DNA, 21 bp, synthetic construct
  misc_feature 1..21: note = Synthetic
  source 1..21: mol_type = other DNA
cactcatacatacaacgggga

SEQ ID NO: 11382 - DNA, 21 bp, synthetic construct
  misc_feature 1..21: note = Synthetic
  source 1..21: mol_type = other DNA
cactcatccgagccatcttcg

SEQ ID NO: 11383 - DNA, 21 bp, synthetic construct
  misc_feature 1..21: note = Synthetic
  source 1..21: mol_type = other DNA
cactcatcgatatcgcactct

SEQ ID NO: 11384 - DNA, 21 bp, synthetic construct
  misc_feature 1..21: note = Synthetic
  source 1..21: mol_type = other DNA
cactcatcgatatcttcgcat

SEQ ID NO: 11385 - DNA, 21 bp, synthetic construct
  misc_feature 1..21: note = Synthetic
  source 1..21: mol_type = other DNA
cactcctcttggctgggtgag

SEQ ID NO: 11386 - DNA, 21 bp, synthetic construct
  misc_feature 1..21: note = Synthetic
  source 1..21: mol_type = other DNA
cactcgccacttaggcagtgg

SEQ ID NO: 11387 - DNA, 21 bp, synthetic construct
  misc_feature 1..21: note = Synthetic
  source 1..21: mol_type = other DNA
cactcgtagccgatcttaagg

SEQ ID NO: 11388 - DNA, 21 bp, synthetic construct
  misc_feature 1..21: note = Synthetic
  source 1..21: mol_type = other DNA
cactctttgatgggttcatct

SEQ ID NO: 11389 - DNA, 21 bp, synthetic construct
  misc_feature 1..21: note = Synthetic
  source 1..21: mol_type = other DNA
cactgaaaatggcttcgttga

SEQ ID NO: 11390 - DNA, 21 bp, synthetic construct
  misc_feature 1..21: note = Synthetic
  source 1..21: mol_type = other DNA
cactgaacaaatacagcaacc

SEQ ID NO: 11391 - DNA, 21 bp, synthetic construct
  misc_feature 1..21: note = Synthetic
  source 1..21: mol_type = other DNA
cactgaatgttttcagtcacc

SEQ ID NO: 11392 - DNA, 21 bp, synthetic construct
  misc_feature 1..21: note = Synthetic
  source 1..21: mol_type = other DNA
cactgaggagatctagggtga

SEQ ID NO: 11393 - DNA, 21 bp, synthetic construct
  misc_feature 1..21: note = Synthetic
  source 1..21: mol_type = other DNA
cactgcaacctccacctcctg

SEQ ID NO: 11394 - DNA, 21 bp, synthetic construct
  misc_feature 1..21: note = Synthetic
  source 1..21: mol_type = other DNA
cactgcaagctccgcttcccg

SEQ ID NO: 11395 - DNA, 21 bp, synthetic construct
  misc_feature 1..21: note = Synthetic
  source 1..21: mol_type = other DNA
cactgcagcctcagcctctct

SEQ ID NO: 11396 - DNA, 21 bp, synthetic construct
  misc_feature 1..21: note = Synthetic
  source 1..21: mol_type = other DNA
cactgcagcctcagcctctgt

SEQ ID NO: 11397 - DNA, 21 bp, synthetic construct
  misc_feature 1..21: note = Synthetic
  source 1..21: mol_type = other DNA
cactgcagtccccgccgcggc

SEQ ID NO: 11398 - DNA, 21 bp, synthetic construct
  misc_feature 1..21: note = Synthetic
  source 1..21: mol_type = other DNA
cactgccggctgccatggatg

SEQ ID NO: 11399 - DNA, 21 bp, synthetic construct
  misc_feature 1..21: note = Synthetic
  source 1..21: mol_type = other DNA
cactgcgcccggcctcaccgt

SEQ ID NO: 11400 - DNA, 21 bp, synthetic construct
  misc_feature 1..21: note = Synthetic
  source 1..21: mol_type = other DNA
cactggaactcgtttctttcg

SEQ ID NO: 11401 - DNA, 21 bp, synthetic construct
  misc_feature 1..21: note = Synthetic
  source 1..21: mol_type = other DNA
cactggaagctggcgggacca

SEQ ID NO: 11402 - DNA, 21 bp, synthetic construct
  misc_feature 1..21: note = Synthetic
  source 1..21: mol_type = other DNA
cactggaattcgtcagggcga

SEQ ID NO: 11403 - DNA, 21 bp, synthetic construct
  misc_feature 1..21: note = Synthetic
  source 1..21: mol_type = other DNA
cactggcacttgtagccaccc

SEQ ID NO: 11404 - DNA, 21 bp, synthetic construct
  misc_feature 1..21: note = Synthetic
  source 1..21: mol_type = other DNA
cactgggggggacacagtgtt

SEQ ID NO: 11405 - DNA, 21 bp, synthetic construct
  misc_feature 1..21: note = Synthetic
  source 1..21: mol_type = other DNA
cactgggtgggtcatgattcg

SEQ ID NO: 11406 - DNA, 21 bp, synthetic construct
  misc_feature 1..21: note = Synthetic
  source 1..21: mol_type = other DNA
cactgtagggagaggcacgct

SEQ ID NO: 11407 - DNA, 21 bp, synthetic construct
  misc_feature 1..21: note = Synthetic
  source 1..21: mol_type = other DNA
cactgtccgaagcctgttctg

SEQ ID NO: 11408 - DNA, 21 bp, synthetic construct
  misc_feature 1..21: note = Synthetic
  source 1..21: mol_type = other DNA
cactgtctctccggacatcag

SEQ ID NO: 11409 - DNA, 21 bp, synthetic construct
  misc_feature 1..21: note = Synthetic
  source 1..21: mol_type = other DNA
cacttaataaatattaagggt

SEQ ID NO: 11410 - DNA, 21 bp, synthetic construct
  misc_feature 1..21: note = Synthetic
  source 1..21: mol_type = other DNA
cacttaggcagtggaactcga

SEQ ID NO: 11411 - DNA, 21 bp, synthetic construct
  misc_feature 1..21: note = Synthetic
  source 1..21: mol_type = other DNA
cacttcccatcgtggcagcga

SEQ ID NO: 11412 - DNA, 21 bp, synthetic construct
  misc_feature 1..21: note = Synthetic
  source 1..21: mol_type = other DNA
cacttgaacttgttgggtccc

SEQ ID NO: 11413 - DNA, 21 bp, synthetic construct
  misc_feature 1..21: note = Synthetic
  source 1..21: mol_type = other DNA
cacttgcttctctgggcctga

SEQ ID NO: 11414 - DNA, 21 bp, synthetic construct
  misc_feature 1..21: note = Synthetic
  source 1..21: mol_type = other DNA
cacttggccatcgcacctcca

SEQ ID NO: 11415 - DNA, 21 bp, synthetic construct
  misc_feature 1..21: note = Synthetic
  source 1..21: mol_type = other DNA
cacttgtagccaccctccagg

SEQ ID NO: 11416 - DNA, 21 bp, synthetic construct
  misc_feature 1..21: note = Synthetic
  source 1..21: mol_type = other DNA
cacttgtaggagatgcatttc

SEQ ID NO: 11417 - DNA, 21 bp, synthetic construct
  misc_feature 1..21: note = Synthetic
  source 1..21: mol_type = other DNA
cagaaaacagtgcaaaataat

SEQ ID NO: 11418 - DNA, 21 bp, synthetic construct
  misc_feature 1..21: note = Synthetic
  source 1..21: mol_type = other DNA
cagaaagaacctgaagtcccg

SEQ ID NO: 11419 - DNA, 21 bp, synthetic construct
  misc_feature 1..21: note = Synthetic
  source 1..21: mol_type = other DNA
cagaaaggcttatcacggttc

SEQ ID NO: 11420 - DNA, 21 bp, synthetic construct
  misc_feature 1..21: note = Synthetic
  source 1..21: mol_type = other DNA
cagaactgaggaatgcagcgg

SEQ ID NO: 11421 - DNA, 21 bp, synthetic construct
  misc_feature 1..21: note = Synthetic
  source 1..21: mol_type = other DNA
cagaagccactcatacataca

SEQ ID NO: 11422 - DNA, 21 bp, synthetic construct
  misc_feature 1..21: note = Synthetic
  source 1..21: mol_type = other DNA
cagacaagcacgtctcctggg

SEQ ID NO: 11423 - DNA, 21 bp, synthetic construct
  misc_feature 1..21: note = Synthetic
  source 1..21: mol_type = other DNA
cagacagccttgctcgtctga

SEQ ID NO: 11424 - DNA, 21 bp, synthetic construct
  misc_feature 1..21: note = Synthetic
  source 1..21: mol_type = other DNA
cagaccaaggaggggcgggga

SEQ ID NO: 11425 - DNA, 21 bp, synthetic construct
  misc_feature 1..21: note = Synthetic
  source 1..21: mol_type = other DNA
cagaccagtagattctattgc

SEQ ID NO: 11426 - DNA, 21 bp, synthetic construct
  misc_feature 1..21: note = Synthetic
  source 1..21: mol_type = other DNA
cagacccacttgtaggagatg

SEQ ID NO: 11427 - DNA, 21 bp, synthetic construct
  misc_feature 1..21: note = Synthetic
  source 1..21: mol_type = other DNA
cagacgaactgccgagagatg

SEQ ID NO: 11428 - DNA, 21 bp, synthetic construct
  misc_feature 1..21: note = Synthetic
  source 1..21: mol_type = other DNA
cagacgtgggaacagccgccg

SEQ ID NO: 11429 - DNA, 21 bp, synthetic construct
  misc_feature 1..21: note = Synthetic
  source 1..21: mol_type = other DNA
cagactgaccatcgaggggta

SEQ ID NO: 11430 - DNA, 21 bp, synthetic construct
  misc_feature 1..21: note = Synthetic
  source 1..21: mol_type = other DNA
cagactgaccatctgtctcga

SEQ ID NO: 11431 - DNA, 21 bp, synthetic construct
  misc_feature 1..21: note = Synthetic
  source 1..21: mol_type = other DNA
cagactgcggactgcagtggc

SEQ ID NO: 11432 - DNA, 21 bp, synthetic construct
  misc_feature 1..21: note = Synthetic
  source 1..21: mol_type = other DNA
cagactggaggatttatttat

SEQ ID NO: 11433 - DNA, 21 bp, synthetic construct
  misc_feature 1..21: note = Synthetic
  source 1..21: mol_type = other DNA
cagactttgtccagggtgatg

SEQ ID NO: 11434 - DNA, 21 bp, synthetic construct
  misc_feature 1..21: note = Synthetic
  source 1..21: mol_type = other DNA
cagagacagtgcccaggacag

SEQ ID NO: 11435 - DNA, 21 bp, synthetic construct
  misc_feature 1..21: note = Synthetic
  source 1..21: mol_type = other DNA
cagagacccagctccgtggcg

SEQ ID NO: 11436 - DNA, 21 bp, synthetic construct
  misc_feature 1..21: note = Synthetic
  source 1..21: mol_type = other DNA
cagagcacagcggaaaccggg

SEQ ID NO: 11437 - DNA, 21 bp, synthetic construct
  misc_feature 1..21: note = Synthetic
  source 1..21: mol_type = other DNA
cagagcactggaattcgtcag

SEQ ID NO: 11438 - DNA, 21 bp, synthetic construct
  misc_feature 1..21: note = Synthetic
  source 1..21: mol_type = other DNA
cagagccatcctggcactcag

SEQ ID NO: 11439 - DNA, 21 bp, synthetic construct
  misc_feature 1..21: note = Synthetic
  source 1..21: mol_type = other DNA
cagagccctcacgctactggg

SEQ ID NO: 11440 - DNA, 21 bp, synthetic construct
  misc_feature 1..21: note = Synthetic
  source 1..21: mol_type = other DNA
cagagcgaccacgttcctcag

SEQ ID NO: 11441 - DNA, 21 bp, synthetic construct
  misc_feature 1..21: note = Synthetic
  source 1..21: mol_type = other DNA
cagagctggctgcaggtgtcg

SEQ ID NO: 11442 - DNA, 21 bp, synthetic construct
  misc_feature 1..21: note = Synthetic
  source 1..21: mol_type = other DNA
cagagcttggtgagacattgt

SEQ ID NO: 11443 - DNA, 21 bp, synthetic construct
  misc_feature 1..21: note = Synthetic
  source 1..21: mol_type = other DNA
cagaggcaataaccccctaca

SEQ ID NO: 11444 - DNA, 21 bp, synthetic construct
  misc_feature 1..21: note = Synthetic
  source 1..21: mol_type = other DNA
cagaggccatgggctgctgat

SEQ ID NO: 11445 - DNA, 21 bp, synthetic construct
  misc_feature 1..21: note = Synthetic
  source 1..21: mol_type = other DNA
cagagtcggtccagtagatgt

SEQ ID NO: 11446 - DNA, 21 bp, synthetic construct
  misc_feature 1..21: note = Synthetic
  source 1..21: mol_type = other DNA
cagagtgtcacattaacgcag

SEQ ID NO: 11447 - DNA, 21 bp, synthetic construct
  misc_feature 1..21: note = Synthetic
  source 1..21: mol_type = other DNA
cagagtgtcagacagccttgc

SEQ ID NO: 11448 - DNA, 21 bp, synthetic construct
  misc_feature 1..21: note = Synthetic
  source 1..21: mol_type = other DNA
cagatactggcagccgccatt

SEQ ID NO: 11449 - DNA, 21 bp, synthetic construct
  misc_feature 1..21: note = Synthetic
  source 1..21: mol_type = other DNA
cagatcattctctgggacagg

SEQ ID NO: 11450 - DNA, 21 bp, synthetic construct
  misc_feature 1..21: note = Synthetic
  source 1..21: mol_type = other DNA
cagatcatttccgacgccatg

SEQ ID NO: 11451 - DNA, 21 bp, synthetic construct
  misc_feature 1..21: note = Synthetic
  source 1..21: mol_type = other DNA
cagatgaataaatatataaaa

SEQ ID NO: 11452 - DNA, 21 bp, synthetic construct
  misc_feature 1..21: note = Synthetic
  source 1..21: mol_type = other DNA
cagatgttcacgccacgtcat

SEQ ID NO: 11453 - DNA, 21 bp, synthetic construct
  misc_feature 1..21: note = Synthetic
  source 1..21: mol_type = other DNA
cagatttgtccttgcagtcgg

SEQ ID NO: 11454 - DNA, 21 bp, synthetic construct
  misc_feature 1..21: note = Synthetic
  source 1..21: mol_type = other DNA
cagcaaccagggtttgcaaaa

SEQ ID NO: 11455 - DNA, 21 bp, synthetic construct
  misc_feature 1..21: note = Synthetic
  source 1..21: mol_type = other DNA
cagcaacgtcgcccagagctt

SEQ ID NO: 11456 - DNA, 21 bp, synthetic construct
  misc_feature 1..21: note = Synthetic
  source 1..21: mol_type = other DNA
cagcagcatgccgtccgggca

SEQ ID NO: 11457 - DNA, 21 bp, synthetic construct
  misc_feature 1..21: note = Synthetic
  source 1..21: mol_type = other DNA
cagcatgccgtccgggcaggc

SEQ ID NO: 11458 - DNA, 21 bp, synthetic construct
  misc_feature 1..21: note = Synthetic
  source 1..21: mol_type = other DNA
cagccaacaagttgacatcgg

SEQ ID NO: 11459 - DNA, 21 bp, synthetic construct
  misc_feature 1..21: note = Synthetic
  source 1..21: mol_type = other DNA
cagccaacttcatcgctcatg

SEQ ID NO: 11460 - DNA, 21 bp, synthetic construct
  misc_feature 1..21: note = Synthetic
  source 1..21: mol_type = other DNA
cagccacacctgggtgcaggc

SEQ ID NO: 11461 - DNA, 21 bp, synthetic construct
  misc_feature 1..21: note = Synthetic
  source 1..21: mol_type = other DNA
cagccagatcatttccgacgc

SEQ ID NO: 11462 - DNA, 21 bp, synthetic construct
  misc_feature 1..21: note = Synthetic
  source 1..21: mol_type = other DNA
cagccagcccgtcgggggcct

SEQ ID NO: 11463 - DNA, 21 bp, synthetic construct
  misc_feature 1..21: note = Synthetic
  source 1..21: mol_type = other DNA
cagccccagggccccatgctc

SEQ ID NO: 11464 - DNA, 21 bp, synthetic construct
  misc_feature 1..21: note = Synthetic
  source 1..21: mol_type = other DNA
cagcccgtcgggggcctggat

SEQ ID NO: 11465 - DNA, 21 bp, synthetic construct
  misc_feature 1..21: note = Synthetic
  source 1..21: mol_type = other DNA
cagccgccattgctcagggtg

SEQ ID NO: 11466 - DNA, 21 bp, synthetic construct
  misc_feature 1..21: note = Synthetic
  source 1..21: mol_type = other DNA
cagccgccgttgttgtccaag

SEQ ID NO: 11467 - DNA, 21 bp, synthetic construct
  misc_feature 1..21: note = Synthetic
  source 1..21: mol_type = other DNA
cagccgggaggtgtcgggaac

SEQ ID NO: 11468 - DNA, 21 bp, synthetic construct
  misc_feature 1..21: note = Synthetic
  source 1..21: mol_type = other DNA
cagcctcaaatgcctgagctc

SEQ ID NO: 11469 - DNA, 21 bp, synthetic construct
  misc_feature 1..21: note = Synthetic
  source 1..21: mol_type = other DNA
cagcctcagcctctcttggct

SEQ ID NO: 11470 - DNA, 21 bp, synthetic construct
  misc_feature 1..21: note = Synthetic
  source 1..21: mol_type = other DNA
cagcctcagcctctgtgaggc

SEQ ID NO: 11471 - DNA, 21 bp, synthetic construct
  misc_feature 1..21: note = Synthetic
  source 1..21: mol_type = other DNA
cagcctcccaaagtgctggga

SEQ ID NO: 11472 - DNA, 21 bp, synthetic construct
  misc_feature 1..21: note = Synthetic
  source 1..21: mol_type = other DNA
cagcctcccaagtagctggga

SEQ ID NO: 11473 - DNA, 21 bp, synthetic construct
  misc_feature 1..21: note = Synthetic
  source 1..21: mol_type = other DNA
cagcctcccgagtagctggga

SEQ ID NO: 11474 - DNA, 21 bp, synthetic construct
  misc_feature 1..21: note = Synthetic
  source 1..21: mol_type = other DNA
cagcctcgccatgcctggcca

SEQ ID NO: 11475 - DNA, 21 bp, synthetic construct
  misc_feature 1..21: note = Synthetic
  source 1..21: mol_type = other DNA
cagcctctcttggctgggtga

SEQ ID NO: 11476 - DNA, 21 bp, synthetic construct
  misc_feature 1..21: note = Synthetic
  source 1..21: mol_type = other DNA
cagcctctgccaggcagtgtc

SEQ ID NO: 11477 - DNA, 21 bp, synthetic construct
  misc_feature 1..21: note = Synthetic
  source 1..21: mol_type = other DNA
cagcctctgtgaggcagctcc

SEQ ID NO: 11478 - DNA, 21 bp, synthetic construct
  misc_feature 1..21: note = Synthetic
  source 1..21: mol_type = other DNA
cagcctcttttcatcctccaa

SEQ ID NO: 11479 - DNA, 21 bp, synthetic construct
  misc_feature 1..21: note = Synthetic
  source 1..21: mol_type = other DNA
cagccttgcaggccttcgtgt

SEQ ID NO: 11480 - DNA, 21 bp, synthetic construct
  misc_feature 1..21: note = Synthetic
  source 1..21: mol_type = other DNA
cagccttgctcgtctgagccg

SEQ ID NO: 11481 - DNA, 21 bp, synthetic construct
  misc_feature 1..21: note = Synthetic
  source 1..21: mol_type = other DNA
cagcgaaactcgtcctgggag

SEQ ID NO: 11482 - DNA, 21 bp, synthetic construct
  misc_feature 1..21: note = Synthetic
  source 1..21: mol_type = other DNA
cagcgagtagatgtccacacc

SEQ ID NO: 11483 - DNA, 21 bp, synthetic construct
  misc_feature 1..21: note = Synthetic
  source 1..21: mol_type = other DNA
cagcgcaatttccagccccag

SEQ ID NO: 11484 - DNA, 21 bp, synthetic construct
  misc_feature 1..21: note = Synthetic
  source 1..21: mol_type = other DNA
cagcgcagttttcctcgtcag

SEQ ID NO: 11485 - DNA, 21 bp, synthetic construct
  misc_feature 1..21: note = Synthetic
  source 1..21: mol_type = other DNA
cagcgccagctggagtggatg

SEQ ID NO: 11486 - DNA, 21 bp, synthetic construct
  misc_feature 1..21: note = Synthetic
  source 1..21: mol_type = other DNA
cagcgctgccatcgcagaccc

SEQ ID NO: 11487 - DNA, 21 bp, synthetic construct
  misc_feature 1..21: note = Synthetic
  source 1..21: mol_type = other DNA
cagcgctgcggccactcatcc

SEQ ID NO: 11488 - DNA, 21 bp, synthetic construct
  misc_feature 1..21: note = Synthetic
  source 1..21: mol_type = other DNA
cagcggaaaccggggacttcg

SEQ ID NO: 11489 - DNA, 21 bp, synthetic construct
  misc_feature 1..21: note = Synthetic
  source 1..21: mol_type = other DNA
cagcggttgacacggccccca

SEQ ID NO: 11490 - DNA, 21 bp, synthetic construct
  misc_feature 1..21: note = Synthetic
  source 1..21: mol_type = other DNA
cagcgtcatcttcctgacctc

SEQ ID NO: 11491 - DNA, 21 bp, synthetic construct
  misc_feature 1..21: note = Synthetic
  source 1..21: mol_type = other DNA
cagctcagcctcccaaagtgc

SEQ ID NO: 11492 - DNA, 21 bp, synthetic construct
  misc_feature 1..21: note = Synthetic
  source 1..21: mol_type = other DNA
cagctccgtggcgatggggag

SEQ ID NO: 11493 - DNA, 21 bp, synthetic construct
  misc_feature 1..21: note = Synthetic
  source 1..21: mol_type = other DNA
cagctcctcatgtccctggcc

SEQ ID NO: 11494 - DNA, 21 bp, synthetic construct
  misc_feature 1..21: note = Synthetic
  source 1..21: mol_type = other DNA
cagctgaagtccccggatttg

SEQ ID NO: 11495 - DNA, 21 bp, synthetic construct
  misc_feature 1..21: note = Synthetic
  source 1..21: mol_type = other DNA
cagctgatttttaactttttg

SEQ ID NO: 11496 - DNA, 21 bp, synthetic construct
  misc_feature 1..21: note = Synthetic
  source 1..21: mol_type = other DNA
cagctgcccccgagaccagag

SEQ ID NO: 11497 - DNA, 21 bp, synthetic construct
  misc_feature 1..21: note = Synthetic
  source 1..21: mol_type = other DNA
cagctggaagccgtcggggca

SEQ ID NO: 11498 - DNA, 21 bp, synthetic construct
  misc_feature 1..21: note = Synthetic
  source 1..21: mol_type = other DNA
cagctggaagccttcctcaca

SEQ ID NO: 11499 - DNA, 21 bp, synthetic construct
  misc_feature 1..21: note = Synthetic
  source 1..21: mol_type = other DNA
cagctggagtggatgcactcg

SEQ ID NO: 11500 - DNA, 21 bp, synthetic construct
  misc_feature 1..21: note = Synthetic
  source 1..21: mol_type = other DNA
cagctgggggatgcaggtgga

SEQ ID NO: 11501 - DNA, 21 bp, synthetic construct
  misc_feature 1..21: note = Synthetic
  source 1..21: mol_type = other DNA
caggaaccgcggaggaacgcc

SEQ ID NO: 11502 - DNA, 21 bp, synthetic construct
  misc_feature 1..21: note = Synthetic
  source 1..21: mol_type = other DNA
caggaagggttctgggcaggg

SEQ ID NO: 11503 - DNA, 21 bp, synthetic construct
  misc_feature 1..21: note = Synthetic
  source 1..21: mol_type = other DNA
caggacaaggtggggacggag

SEQ ID NO: 11504 - DNA, 21 bp, synthetic construct
  misc_feature 1..21: note = Synthetic
  source 1..21: mol_type = other DNA
caggacagagtcggtccagta

SEQ ID NO: 11505 - DNA, 21 bp, synthetic construct
  misc_feature 1..21: note = Synthetic
  source 1..21: mol_type = other DNA
caggacagccttgctcgtctg

SEQ ID NO: 11506 - DNA, 21 bp, synthetic construct
  misc_feature 1..21: note = Synthetic
  source 1..21: mol_type = other DNA
caggaggcctcgtctgagccg

SEQ ID NO: 11507 - DNA, 21 bp, synthetic construct
  misc_feature 1..21: note = Synthetic
  source 1..21: mol_type = other DNA
caggagggcccaggataacgg

SEQ ID NO: 11508 - DNA, 21 bp, synthetic construct
  misc_feature 1..21: note = Synthetic
  source 1..21: mol_type = other DNA
caggataacggagggcgactc

SEQ ID NO: 11509 - DNA, 21 bp, synthetic construct
  misc_feature 1..21: note = Synthetic
  source 1..21: mol_type = other DNA
caggatccaccacgatggccc

SEQ ID NO: 11510 - DNA, 21 bp, synthetic construct
  misc_feature 1..21: note = Synthetic
  source 1..21: mol_type = other DNA
caggatggtctcgatctcctg

SEQ ID NO: 11511 - DNA, 21 bp, synthetic construct
  misc_feature 1..21: note = Synthetic
  source 1..21: mol_type = other DNA
caggcaaaggaagacgaggag

SEQ ID NO: 11512 - DNA, 21 bp, synthetic construct
  misc_feature 1..21: note = Synthetic
  source 1..21: mol_type = other DNA
caggcaatgctttggtcttct

SEQ ID NO: 11513 - DNA, 21 bp, synthetic construct
  misc_feature 1..21: note = Synthetic
  source 1..21: mol_type = other DNA
caggcacgtgccaccgtaccc

SEQ ID NO: 11514 - DNA, 21 bp, synthetic construct
  misc_feature 1..21: note = Synthetic
  source 1..21: mol_type = other DNA
caggcactcgtagccgatctt

SEQ ID NO: 11515 - DNA, 21 bp, synthetic construct
  misc_feature 1..21: note = Synthetic
  source 1..21: mol_type = other DNA
caggcacttaataaatattaa

SEQ ID NO: 11516 - DNA, 21 bp, synthetic construct
  misc_feature 1..21: note = Synthetic
  source 1..21: mol_type = other DNA
caggcagatgttcacgccacg

SEQ ID NO: 11517 - DNA, 21 bp, synthetic construct
  misc_feature 1..21: note = Synthetic
  source 1..21: mol_type = other DNA
caggcagccgggaggtgtcgg

SEQ ID NO: 11518 - DNA, 21 bp, synthetic construct
  misc_feature 1..21: note = Synthetic
  source 1..21: mol_type = other DNA
caggcagtgtcccgacccgga

SEQ ID NO: 11519 - DNA, 21 bp, synthetic construct
  misc_feature 1..21: note = Synthetic
  source 1..21: mol_type = other DNA
caggccacgtgtcctcacggc

SEQ ID NO: 11520 - DNA, 21 bp, synthetic construct
  misc_feature 1..21: note = Synthetic
  source 1..21: mol_type = other DNA
caggccagactgcggactgca

SEQ ID NO: 11521 - DNA, 21 bp, synthetic construct
  misc_feature 1..21: note = Synthetic
  source 1..21: mol_type = other DNA
caggcccacagctgggggatg

SEQ ID NO: 11522 - DNA, 21 bp, synthetic construct
  misc_feature 1..21: note = Synthetic
  source 1..21: mol_type = other DNA
caggccccctttcttgatctt

SEQ ID NO: 11523 - DNA, 21 bp, synthetic construct
  misc_feature 1..21: note = Synthetic
  source 1..21: mol_type = other DNA
caggcctggtctccaactcct

SEQ ID NO: 11524 - DNA, 21 bp, synthetic construct
  misc_feature 1..21: note = Synthetic
  source 1..21: mol_type = other DNA
caggccttcgtgtgggggtcc

SEQ ID NO: 11525 - DNA, 21 bp, synthetic construct
  misc_feature 1..21: note = Synthetic
  source 1..21: mol_type = other DNA
caggcgatcctcctgcctcag

SEQ ID NO: 11526 - DNA, 21 bp, synthetic construct
  misc_feature 1..21: note = Synthetic
  source 1..21: mol_type = other DNA
caggcgcaggtaaacttgggc

SEQ ID NO: 11527 - DNA, 21 bp, synthetic construct
  misc_feature 1..21: note = Synthetic
  source 1..21: mol_type = other DNA
caggcgtgagccactgcgccc

SEQ ID NO: 11528 - DNA, 21 bp, synthetic construct
  misc_feature 1..21: note = Synthetic
  source 1..21: mol_type = other DNA
caggcgtgaggcacctgtgtc

SEQ ID NO: 11529 - DNA, 21 bp, synthetic construct
  misc_feature 1..21: note = Synthetic
  source 1..21: mol_type = other DNA
caggctacaaaaaccttctat

SEQ ID NO: 11530 - DNA, 21 bp, synthetic construct
  misc_feature 1..21: note = Synthetic
  source 1..21: mol_type = other DNA
caggctctgcctctgggaagt

SEQ ID NO: 11531 - DNA, 21 bp, synthetic construct
  misc_feature 1..21: note = Synthetic
  source 1..21: mol_type = other DNA
caggctggaaagcagtggcat

SEQ ID NO: 11532 - DNA, 21 bp, synthetic construct
  misc_feature 1..21: note = Synthetic
  source 1..21: mol_type = other DNA
caggctggagtgcagtggctc

SEQ ID NO: 11533 - DNA, 21 bp, synthetic construct
  misc_feature 1..21: note = Synthetic
  source 1..21: mol_type = other DNA
caggctggtgtcctgacagcc

SEQ ID NO: 11534 - DNA, 21 bp, synthetic construct
  misc_feature 1..21: note = Synthetic
  source 1..21: mol_type = other DNA
cagggacgcatttacgtgctc

SEQ ID NO: 11535 - DNA, 21 bp, synthetic construct
  misc_feature 1..21: note = Synthetic
  source 1..21: mol_type = other DNA
cagggacgggactccaggcag

SEQ ID NO: 11536 - DNA, 21 bp, synthetic construct
  misc_feature 1..21: note = Synthetic
  source 1..21: mol_type = other DNA
cagggaggcacagatactggc

SEQ ID NO: 11537 - DNA, 21 bp, synthetic construct
  misc_feature 1..21: note = Synthetic
  source 1..21: mol_type = other DNA
cagggcaaaggctaacctggc

SEQ ID NO: 11538 - DNA, 21 bp, synthetic construct
  misc_feature 1..21: note = Synthetic
  source 1..21: mol_type = other DNA
cagggccagggggtcccgttg

SEQ ID NO: 11539 - DNA, 21 bp, synthetic construct
  misc_feature 1..21: note = Synthetic
  source 1..21: mol_type = other DNA
cagggccccatgctcgcagcc

SEQ ID NO: 11540 - DNA, 21 bp, synthetic construct
  misc_feature 1..21: note = Synthetic
  source 1..21: mol_type = other DNA
cagggccccgagaatagtcac

SEQ ID NO: 11541 - DNA, 21 bp, synthetic construct
  misc_feature 1..21: note = Synthetic
  source 1..21: mol_type = other DNA
cagggcgacaggtggccacag

SEQ ID NO: 11542 - DNA, 21 bp, synthetic construct
  misc_feature 1..21: note = Synthetic
  source 1..21: mol_type = other DNA
caggggctactgtccccttgg

SEQ ID NO: 11543 - DNA, 21 bp, synthetic construct
  misc_feature 1..21: note = Synthetic
  source 1..21: mol_type = other DNA
cagggggtcccgttggtgcca

SEQ ID NO: 11544 - DNA, 21 bp, synthetic construct
  misc_feature 1..21: note = Synthetic
  source 1..21: mol_type = other DNA
caggggtggccccaggcagcc

SEQ ID NO: 11545 - DNA, 21 bp, synthetic construct
  misc_feature 1..21: note = Synthetic
  source 1..21: mol_type = other DNA
cagggtgatgcattcgccgct

SEQ ID NO: 11546 - DNA, 21 bp, synthetic construct
  misc_feature 1..21: note = Synthetic
  source 1..21: mol_type = other DNA
cagggtggtcctctcacacca

SEQ ID NO: 11547 - DNA, 21 bp, synthetic construct
  misc_feature 1..21: note = Synthetic
  source 1..21: mol_type = other DNA
cagggtttgcaaaaataaata

SEQ ID NO: 11548 - DNA, 21 bp, synthetic construct
  misc_feature 1..21: note = Synthetic
  source 1..21: mol_type = other DNA
caggtaaacttgggcgagtgg

SEQ ID NO: 11549 - DNA, 21 bp, synthetic construct
  misc_feature 1..21: note = Synthetic
  source 1..21: mol_type = other DNA
caggtcagaccagtagattct

SEQ ID NO: 11550 - DNA, 21 bp, synthetic construct
  misc_feature 1..21: note = Synthetic
  source 1..21: mol_type = other DNA
caggtcgggtggttgtgtgct

SEQ ID NO: 11551 - DNA, 21 bp, synthetic construct
  misc_feature 1..21: note = Synthetic
  source 1..21: mol_type = other DNA
caggtgacagacaagcacgtc

SEQ ID NO: 11552 - DNA, 21 bp, synthetic construct
  misc_feature 1..21: note = Synthetic
  source 1..21: mol_type = other DNA
caggtgagcaccgggcaggag

SEQ ID NO: 11553 - DNA, 21 bp, synthetic construct
  misc_feature 1..21: note = Synthetic
  source 1..21: mol_type = other DNA
caggtgcccgccaccacgccc

SEQ ID NO: 11554 - DNA, 21 bp, synthetic construct
  misc_feature 1..21: note = Synthetic
  source 1..21: mol_type = other DNA
caggtggagctgttgcactgg

SEQ ID NO: 11555 - DNA, 21 bp, synthetic construct
  misc_feature 1..21: note = Synthetic
  source 1..21: mol_type = other DNA
caggtggccacagcgcagttt

SEQ ID NO: 11556 - DNA, 21 bp, synthetic construct
  misc_feature 1..21: note = Synthetic
  source 1..21: mol_type = other DNA
caggtggccacaggacagcct

SEQ ID NO: 11557 - DNA, 21 bp, synthetic construct
  misc_feature 1..21: note = Synthetic
  source 1..21: mol_type = other DNA
caggtgtcgggatcctgacac

SEQ ID NO: 11558 - DNA, 21 bp, synthetic construct
  misc_feature 1..21: note = Synthetic
  source 1..21: mol_type = other DNA
caggttcacgcagagctggct

SEQ ID NO: 11559 - DNA, 21 bp, synthetic construct
  misc_feature 1..21: note = Synthetic
  source 1..21: mol_type = other DNA
caggttggggatgaggctggt

SEQ ID NO: 11560 - DNA, 21 bp, synthetic construct
  misc_feature 1..21: note = Synthetic
  source 1..21: mol_type = other DNA
cagtaacacggcgatttcaga

SEQ ID NO: 11561 - DNA, 21 bp, synthetic construct
  misc_feature 1..21: note = Synthetic
  source 1..21: mol_type = other DNA
cagtaagacattcaggctaca

SEQ ID NO: 11562 - DNA, 21 bp, synthetic construct
  misc_feature 1..21: note = Synthetic
  source 1..21: mol_type = other DNA
cagtacatgaagccatgaaca

SEQ ID NO: 11563 - DNA, 21 bp, synthetic construct
  misc_feature 1..21: note = Synthetic
  source 1..21: mol_type = other DNA
cagtagaggcggccactgagg

SEQ ID NO: 11564 - DNA, 21 bp, synthetic construct
  misc_feature 1..21: note = Synthetic
  source 1..21: mol_type = other DNA
cagtagatgttgctgtggatc

SEQ ID NO: 11565 - DNA, 21 bp, synthetic construct
  misc_feature 1..21: note = Synthetic
  source 1..21: mol_type = other DNA
cagtagattctattgctggcc

SEQ ID NO: 11566 - DNA, 21 bp, synthetic construct
  misc_feature 1..21: note = Synthetic
  source 1..21: mol_type = other DNA
cagtaggttttcagccaacaa

SEQ ID NO: 11567 - DNA, 21 bp, synthetic construct
  misc_feature 1..21: note = Synthetic
  source 1..21: mol_type = other DNA
cagtcaccagcgagtagatgt

SEQ ID NO: 11568 - DNA, 21 bp, synthetic construct
  misc_feature 1..21: note = Synthetic
  source 1..21: mol_type = other DNA
cagtcagtccagtacatgaag

SEQ ID NO: 11569 - DNA, 21 bp, synthetic construct
  misc_feature 1..21: note = Synthetic
  source 1..21: mol_type = other DNA
cagtcatattcccggtcacac

SEQ ID NO: 11570 - DNA, 21 bp, synthetic construct
  misc_feature 1..21: note = Synthetic
  source 1..21: mol_type = other DNA
cagtccacagccagcccgtcg

SEQ ID NO: 11571 - DNA, 21 bp, synthetic construct
  misc_feature 1..21: note = Synthetic
  source 1..21: mol_type = other DNA
cagtccacttggccatcgcac

SEQ ID NO: 11572 - DNA, 21 bp, synthetic construct
  misc_feature 1..21: note = Synthetic
  source 1..21: mol_type = other DNA
cagtccagtacatgaagccat

SEQ ID NO: 11573 - DNA, 21 bp, synthetic construct
  misc_feature 1..21: note = Synthetic
  source 1..21: mol_type = other DNA
cagtccagttcgtgcaaataa

SEQ ID NO: 11574 - DNA, 21 bp, synthetic construct
  misc_feature 1..21: note = Synthetic
  source 1..21: mol_type = other DNA
cagtccccgccgcggcgagga

SEQ ID NO: 11575 - DNA, 21 bp, synthetic construct
  misc_feature 1..21: note = Synthetic
  source 1..21: mol_type = other DNA
cagtcccggcagtctctagcc

SEQ ID NO: 11576 - DNA, 21 bp, synthetic construct
  misc_feature 1..21: note = Synthetic
  source 1..21: mol_type = other DNA
cagtcccggtctgagtcacag

SEQ ID NO: 11577 - DNA, 21 bp, synthetic construct
  misc_feature 1..21: note = Synthetic
  source 1..21: mol_type = other DNA
cagtcggggccaccatcacag

SEQ ID NO: 11578 - DNA, 21 bp, synthetic construct
  misc_feature 1..21: note = Synthetic
  source 1..21: mol_type = other DNA
cagtcggggtcgttgtcgcag

SEQ ID NO: 11579 - DNA, 21 bp, synthetic construct
  misc_feature 1..21: note = Synthetic
  source 1..21: mol_type = other DNA
cagtctctagccatgttgcag

SEQ ID NO: 11580 - DNA, 21 bp, synthetic construct
  misc_feature 1..21: note = Synthetic
  source 1..21: mol_type = other DNA
cagtgactcaggctctgcctc

SEQ ID NO: 11581 - DNA, 21 bp, synthetic construct
  misc_feature 1..21: note = Synthetic
  source 1..21: mol_type = other DNA
cagtgcaaaataataacacaa

SEQ ID NO: 11582 - DNA, 21 bp, synthetic construct
  misc_feature 1..21: note = Synthetic
  source 1..21: mol_type = other DNA
cagtgcaacagtaacacggcg

SEQ ID NO: 11583 - DNA, 21 bp, synthetic construct
  misc_feature 1..21: note = Synthetic
  source 1..21: mol_type = other DNA
cagtgcccaggacagagtcgg

SEQ ID NO: 11584 - DNA, 21 bp, synthetic construct
  misc_feature 1..21: note = Synthetic
  source 1..21: mol_type = other DNA
cagtggaactcgaaggccgag

SEQ ID NO: 11585 - DNA, 21 bp, synthetic construct
  misc_feature 1..21: note = Synthetic
  source 1..21: mol_type = other DNA
cagtggcataatcatagctca

SEQ ID NO: 11586 - DNA, 21 bp, synthetic construct
  misc_feature 1..21: note = Synthetic
  source 1..21: mol_type = other DNA
cagtggcgcaatctcggctca

SEQ ID NO: 11587 - DNA, 21 bp, synthetic construct
  misc_feature 1..21: note = Synthetic
  source 1..21: mol_type = other DNA
cagtggctcgatcatggctca

SEQ ID NO: 11588 - DNA, 21 bp, synthetic construct
  misc_feature 1..21: note = Synthetic
  source 1..21: mol_type = other DNA
cagtggtttaaaaagtgacac

SEQ ID NO: 11589 - DNA, 21 bp, synthetic construct
  misc_feature 1..21: note = Synthetic
  source 1..21: mol_type = other DNA
cagtgtacaactctgaactga

SEQ ID NO: 11590 - DNA, 21 bp, synthetic construct
  misc_feature 1..21: note = Synthetic
  source 1..21: mol_type = other DNA
cagtgtcccgacccggatcac

SEQ ID NO: 11591 - DNA, 21 bp, synthetic construct
  misc_feature 1..21: note = Synthetic
  source 1..21: mol_type = other DNA
cagtgttttgtccctggggac

SEQ ID NO: 11592 - DNA, 21 bp, synthetic construct
  misc_feature 1..21: note = Synthetic
  source 1..21: mol_type = other DNA
cagttcactcctcttggctgg

SEQ ID NO: 11593 - DNA, 21 bp, synthetic construct
  misc_feature 1..21: note = Synthetic
  source 1..21: mol_type = other DNA
cagttcgtgcaaataatcttt

SEQ ID NO: 11594 - DNA, 21 bp, synthetic construct
  misc_feature 1..21: note = Synthetic
  source 1..21: mol_type = other DNA
cagttctcgatattcacgatc

SEQ ID NO: 11595 - DNA, 21 bp, synthetic construct
  misc_feature 1..21: note = Synthetic
  source 1..21: mol_type = other DNA
cagttcttccatagaaggaag

SEQ ID NO: 11596 - DNA, 21 bp, synthetic construct
  misc_feature 1..21: note = Synthetic
  source 1..21: mol_type = other DNA
cagtttcaaccaatatacaaa

SEQ ID NO: 11597 - DNA, 21 bp, synthetic construct
  misc_feature 1..21: note = Synthetic
  source 1..21: mol_type = other DNA
cagtttccatcagagcactgg

SEQ ID NO: 11598 - DNA, 21 bp, synthetic construct
  misc_feature 1..21: note = Synthetic
  source 1..21: mol_type = other DNA
cagttttcctcgtcagatttg

SEQ ID NO: 11599 - DNA, 21 bp, synthetic construct
  misc_feature 1..21: note = Synthetic
  source 1..21: mol_type = other DNA
cataaagaagaggcatttcag

SEQ ID NO: 11600 - DNA, 21 bp, synthetic construct
  misc_feature 1..21: note = Synthetic
  source 1..21: mol_type = other DNA
cataaagacgacaatggcagt

SEQ ID NO: 11601 - DNA, 21 bp, synthetic construct
  misc_feature 1..21: note = Synthetic
  source 1..21: mol_type = other DNA
cataacaaaaaatccccacta

SEQ ID NO: 11602 - DNA, 21 bp, synthetic construct
  misc_feature 1..21: note = Synthetic
  source 1..21: mol_type = other DNA
cataatcatagctcacgacag

SEQ ID NO: 11603 - DNA, 21 bp, synthetic construct
  misc_feature 1..21: note = Synthetic
  source 1..21: mol_type = other DNA
catacaacggggacatcattc

SEQ ID NO: 11604 - DNA, 21 bp, synthetic construct
  misc_feature 1..21: note = Synthetic
  source 1..21: mol_type = other DNA
catacatacaacggggacatc

SEQ ID NO: 11605 - DNA, 21 bp, synthetic construct
  misc_feature 1..21: note = Synthetic
  source 1..21: mol_type = other DNA
catacccatcaacgacaagat

SEQ ID NO: 11606 - DNA, 21 bp, synthetic construct
  misc_feature 1..21: note = Synthetic
  source 1..21: mol_type = other DNA
catagaagaggtaaacacgtt

SEQ ID NO: 11607 - DNA, 21 bp, synthetic construct
  misc_feature 1..21: note = Synthetic
  source 1..21: mol_type = other DNA
catagaaggaagacccccagg

SEQ ID NO: 11608 - DNA, 21 bp, synthetic construct
  misc_feature 1..21: note = Synthetic
  source 1..21: mol_type = other DNA
catagaagtggaagcactagg

SEQ ID NO: 11609 - DNA, 21 bp, synthetic construct
  misc_feature 1..21: note = Synthetic
  source 1..21: mol_type = other DNA
catagctcacgacagcctcaa

SEQ ID NO: 11610 - DNA, 21 bp, synthetic construct
  misc_feature 1..21: note = Synthetic
  source 1..21: mol_type = other DNA
cataggaagagacgccgtggg

SEQ ID NO: 11611 - DNA, 21 bp, synthetic construct
  misc_feature 1..21: note = Synthetic
  source 1..21: mol_type = other DNA
catatcctctggggacagtag

SEQ ID NO: 11612 - DNA, 21 bp, synthetic construct
  misc_feature 1..21: note = Synthetic
  source 1..21: mol_type = other DNA
catattcccggtcacactgcc

SEQ ID NO: 11613 - DNA, 21 bp, synthetic construct
  misc_feature 1..21: note = Synthetic
  source 1..21: mol_type = other DNA
catcaacgacaagattgggga

SEQ ID NO: 11614 - DNA, 21 bp, synthetic construct
  misc_feature 1..21: note = Synthetic
  source 1..21: mol_type = other DNA
catcacagcgccagctggagt

SEQ ID NO: 11615 - DNA, 21 bp, synthetic construct
  misc_feature 1..21: note = Synthetic
  source 1..21: mol_type = other DNA
catcagagcactggaattcgt

SEQ ID NO: 11616 - DNA, 21 bp, synthetic construct
  misc_feature 1..21: note = Synthetic
  source 1..21: mol_type = other DNA
catcagagccatcctggcact

SEQ ID NO: 11617 - DNA, 21 bp, synthetic construct
  misc_feature 1..21: note = Synthetic
  source 1..21: mol_type = other DNA
catcagtgcaacagtaacacg

SEQ ID NO: 11618 - DNA, 21 bp, synthetic construct
  misc_feature 1..21: note = Synthetic
  source 1..21: mol_type = other DNA
catcattctcccaaaaagcgt

SEQ ID NO: 11619 - DNA, 21 bp, synthetic construct
  misc_feature 1..21: note = Synthetic
  source 1..21: mol_type = other DNA
catcatttggtgaatgagttt

SEQ ID NO: 11620 - DNA, 21 bp, synthetic construct
  misc_feature 1..21: note = Synthetic
  source 1..21: mol_type = other DNA
catcccaacacacacgacaga

SEQ ID NO: 11621 - DNA, 21 bp, synthetic construct
  misc_feature 1..21: note = Synthetic
  source 1..21: mol_type = other DNA
catcccctcccctttcatctt

SEQ ID NO: 11622 - DNA, 21 bp, synthetic construct
  misc_feature 1..21: note = Synthetic
  source 1..21: mol_type = other DNA
catccgagccatcttcgcagt

SEQ ID NO: 11623 - DNA, 21 bp, synthetic construct
  misc_feature 1..21: note = Synthetic
  source 1..21: mol_type = other DNA
catcctccaagatggtcttcc

SEQ ID NO: 11624 - DNA, 21 bp, synthetic construct
  misc_feature 1..21: note = Synthetic
  source 1..21: mol_type = other DNA
catcctccagactgaccatcg

SEQ ID NO: 11625 - DNA, 21 bp, synthetic construct
  misc_feature 1..21: note = Synthetic
  source 1..21: mol_type = other DNA
catcctccagactgaccatct

SEQ ID NO: 11626 - DNA, 21 bp, synthetic construct
  misc_feature 1..21: note = Synthetic
  source 1..21: mol_type = other DNA
catcctcccacctcagcctcg

SEQ ID NO: 11627 - DNA, 21 bp, synthetic construct
  misc_feature 1..21: note = Synthetic
  source 1..21: mol_type = other DNA
catcctctgtggtcttctgat

SEQ ID NO: 11628 - DNA, 21 bp, synthetic construct
  misc_feature 1..21: note = Synthetic
  source 1..21: mol_type = other DNA
catcctggcactcagcgctgc

SEQ ID NO: 11629 - DNA, 21 bp, synthetic construct
  misc_feature 1..21: note = Synthetic
  source 1..21: mol_type = other DNA
catcctggtccccccgggcct

SEQ ID NO: 11630 - DNA, 21 bp, synthetic construct
  misc_feature 1..21: note = Synthetic
  source 1..21: mol_type = other DNA
catcgaggggtagctgtagcc

SEQ ID NO: 11631 - DNA, 21 bp, synthetic construct
  misc_feature 1..21: note = Synthetic
  source 1..21: mol_type = other DNA
catcgatatcgcactctttga

SEQ ID NO: 11632 - DNA, 21 bp, synthetic construct
  misc_feature 1..21: note = Synthetic
  source 1..21: mol_type = other DNA
catcgatatcttcgcatcttc

SEQ ID NO: 11633 - DNA, 21 bp, synthetic construct
  misc_feature 1..21: note = Synthetic
  source 1..21: mol_type = other DNA
catcgatgcttgagatggagt

SEQ ID NO: 11634 - DNA, 21 bp, synthetic construct
  misc_feature 1..21: note = Synthetic
  source 1..21: mol_type = other DNA
catcgcacctccagaactgag

SEQ ID NO: 11635 - DNA, 21 bp, synthetic construct
  misc_feature 1..21: note = Synthetic
  source 1..21: mol_type = other DNA
catcgcagacccacttgtagg

SEQ ID NO: 11636 - DNA, 21 bp, synthetic construct
  misc_feature 1..21: note = Synthetic
  source 1..21: mol_type = other DNA
catcgctcatgtccttgcagt

SEQ ID NO: 11637 - DNA, 21 bp, synthetic construct
  misc_feature 1..21: note = Synthetic
  source 1..21: mol_type = other DNA
catcggaacctgtgaggcggt

SEQ ID NO: 11638 - DNA, 21 bp, synthetic construct
  misc_feature 1..21: note = Synthetic
  source 1..21: mol_type = other DNA
catcgtggcagcgaaactcgt

SEQ ID NO: 11639 - DNA, 21 bp, synthetic construct
  misc_feature 1..21: note = Synthetic
  source 1..21: mol_type = other DNA
catctcccagaagccactcat

SEQ ID NO: 11640 - DNA, 21 bp, synthetic construct
  misc_feature 1..21: note = Synthetic
  source 1..21: mol_type = other DNA
catctgaccagtcccggcagt

SEQ ID NO: 11641 - DNA, 21 bp, synthetic construct
  misc_feature 1..21: note = Synthetic
  source 1..21: mol_type = other DNA
catctgctgttgtgtgttgaa

SEQ ID NO: 11642 - DNA, 21 bp, synthetic construct
  misc_feature 1..21: note = Synthetic
  source 1..21: mol_type = other DNA
catctgtcgcccacgtggctg

SEQ ID NO: 11643 - DNA, 21 bp, synthetic construct
  misc_feature 1..21: note = Synthetic
  source 1..21: mol_type = other DNA
catctgtcgcccactgcagtc

SEQ ID NO: 11644 - DNA, 21 bp, synthetic construct
  misc_feature 1..21: note = Synthetic
  source 1..21: mol_type = other DNA
catctgtctcgaggggtagct

SEQ ID NO: 11645 - DNA, 21 bp, synthetic construct
  misc_feature 1..21: note = Synthetic
  source 1..21: mol_type = other DNA
catctgttgcccaggctggag

SEQ ID NO: 11646 - DNA, 21 bp, synthetic construct
  misc_feature 1..21: note = Synthetic
  source 1..21: mol_type = other DNA
catcttcacgcgggagtctga

SEQ ID NO: 11647 - DNA, 21 bp, synthetic construct
  misc_feature 1..21: note = Synthetic
  source 1..21: mol_type = other DNA
catcttccatgtttgaggatt

SEQ ID NO: 11648 - DNA, 21 bp, synthetic construct
  misc_feature 1..21: note = Synthetic
  source 1..21: mol_type = other DNA
catcttcctgacctcgtgccg

SEQ ID NO: 11649 - DNA, 21 bp, synthetic construct
  misc_feature 1..21: note = Synthetic
  source 1..21: mol_type = other DNA
catcttcgcagtcggggtcgt

SEQ ID NO: 11650 - DNA, 21 bp, synthetic construct
  misc_feature 1..21: note = Synthetic
  source 1..21: mol_type = other DNA
catcttcgctgggccaccagc

SEQ ID NO: 11651 - DNA, 21 bp, synthetic construct
  misc_feature 1..21: note = Synthetic
  source 1..21: mol_type = other DNA
catgaacaggatccaccacga

SEQ ID NO: 11652 - DNA, 21 bp, synthetic construct
  misc_feature 1..21: note = Synthetic
  source 1..21: mol_type = other DNA
catgaagccatgaacaggatc

SEQ ID NO: 11653 - DNA, 21 bp, synthetic construct
  misc_feature 1..21: note = Synthetic
  source 1..21: mol_type = other DNA
catgaatccctttcctggctt

SEQ ID NO: 11654 - DNA, 21 bp, synthetic construct
  misc_feature 1..21: note = Synthetic
  source 1..21: mol_type = other DNA
catgatccacccgcctcggcc

SEQ ID NO: 11655 - DNA, 21 bp, synthetic construct
  misc_feature 1..21: note = Synthetic
  source 1..21: mol_type = other DNA
catgattcgggggtgacaggg

SEQ ID NO: 11656 - DNA, 21 bp, synthetic construct
  misc_feature 1..21: note = Synthetic
  source 1..21: mol_type = other DNA
catgcatggtttttttttgtt

SEQ ID NO: 11657 - DNA, 21 bp, synthetic construct
  misc_feature 1..21: note = Synthetic
  source 1..21: mol_type = other DNA
catgccgtccgggcaggcgca

SEQ ID NO: 11658 - DNA, 21 bp, synthetic construct
  misc_feature 1..21: note = Synthetic
  source 1..21: mol_type = other DNA
catgcctggccagaggccatg

SEQ ID NO: 11659 - DNA, 21 bp, synthetic construct
  misc_feature 1..21: note = Synthetic
  source 1..21: mol_type = other DNA
catgctcgcagcctctgccag

SEQ ID NO: 11660 - DNA, 21 bp, synthetic construct
  misc_feature 1..21: note = Synthetic
  source 1..21: mol_type = other DNA
catggatgcagtttccatcag

SEQ ID NO: 11661 - DNA, 21 bp, synthetic construct
  misc_feature 1..21: note = Synthetic
  source 1..21: mol_type = other DNA
catggctcactgcaacctcca

SEQ ID NO: 11662 - DNA, 21 bp, synthetic construct
  misc_feature 1..21: note = Synthetic
  source 1..21: mol_type = other DNA
catgggcactgtccgaagcct

SEQ ID NO: 11663 - DNA, 21 bp, synthetic construct
  misc_feature 1..21: note = Synthetic
  source 1..21: mol_type = other DNA
catgggctgctgatgcaccat

SEQ ID NO: 11664 - DNA, 21 bp, synthetic construct
  misc_feature 1..21: note = Synthetic
  source 1..21: mol_type = other DNA
catggtttttttttgtttttt

SEQ ID NO: 11665 - DNA, 21 bp, synthetic construct
  misc_feature 1..21: note = Synthetic
  source 1..21: mol_type = other DNA
catgtccctggccagcagcat

SEQ ID NO: 11666 - DNA, 21 bp, synthetic construct
  misc_feature 1..21: note = Synthetic
  source 1..21: mol_type = other DNA
catgtccttgcagtcatattc

SEQ ID NO: 11667 - DNA, 21 bp, synthetic construct
  misc_feature 1..21: note = Synthetic
  source 1..21: mol_type = other DNA
catgttgcagactttgtccag

SEQ ID NO: 11668 - DNA, 21 bp, synthetic construct
  misc_feature 1..21: note = Synthetic
  source 1..21: mol_type = other DNA
catgtttgaggattgtgtcac

SEQ ID NO: 11669 - DNA, 21 bp, synthetic construct
  misc_feature 1..21: note = Synthetic
  source 1..21: mol_type = other DNA
catgttttaaacacataccca

SEQ ID NO: 11670 - DNA, 21 bp, synthetic construct
  misc_feature 1..21: note = Synthetic
  source 1..21: mol_type = other DNA
cattaacgcagccaacttcat

SEQ ID NO: 11671 - DNA, 21 bp, synthetic construct
  misc_feature 1..21: note = Synthetic
  source 1..21: mol_type = other DNA
cattcaggccccctttcttga

SEQ ID NO: 11672 - DNA, 21 bp, synthetic construct
  misc_feature 1..21: note = Synthetic
  source 1..21: mol_type = other DNA
cattcaggctacaaaaacctt

SEQ ID NO: 11673 - DNA, 21 bp, synthetic construct
  misc_feature 1..21: note = Synthetic
  source 1..21: mol_type = other DNA
cattcattgacacgggctttc

SEQ ID NO: 11674 - DNA, 21 bp, synthetic construct
  misc_feature 1..21: note = Synthetic
  source 1..21: mol_type = other DNA
cattcgccgctgtgacacttg

SEQ ID NO: 11675 - DNA, 21 bp, synthetic construct
  misc_feature 1..21: note = Synthetic
  source 1..21: mol_type = other DNA
cattcgttggtcccgcactct

SEQ ID NO: 11676 - DNA, 21 bp, synthetic construct
  misc_feature 1..21: note = Synthetic
  source 1..21: mol_type = other DNA
cattctcccaaaaagcgttgc

SEQ ID NO: 11677 - DNA, 21 bp, synthetic construct
  misc_feature 1..21: note = Synthetic
  source 1..21: mol_type = other DNA
cattctcctgcctcagcctcc

SEQ ID NO: 11678 - DNA, 21 bp, synthetic construct
  misc_feature 1..21: note = Synthetic
  source 1..21: mol_type = other DNA
cattctctgggacaggtcaga

SEQ ID NO: 11679 - DNA, 21 bp, synthetic construct
  misc_feature 1..21: note = Synthetic
  source 1..21: mol_type = other DNA
cattgacacgggctttccctg

SEQ ID NO: 11680 - DNA, 21 bp, synthetic construct
  misc_feature 1..21: note = Synthetic
  source 1..21: mol_type = other DNA
cattgcagacgtgggaacagc

SEQ ID NO: 11681 - DNA, 21 bp, synthetic construct
  misc_feature 1..21: note = Synthetic
  source 1..21: mol_type = other DNA
cattgcatgggcactgtccga

SEQ ID NO: 11682 - DNA, 21 bp, synthetic construct
  misc_feature 1..21: note = Synthetic
  source 1..21: mol_type = other DNA
cattgctcagggtggtcctct

SEQ ID NO: 11683 - DNA, 21 bp, synthetic construct
  misc_feature 1..21: note = Synthetic
  source 1..21: mol_type = other DNA
cattgggccactgaatgtttt

SEQ ID NO: 11684 - DNA, 21 bp, synthetic construct
  misc_feature 1..21: note = Synthetic
  source 1..21: mol_type = other DNA
cattgtcactatctccaccgt

SEQ ID NO: 11685 - DNA, 21 bp, synthetic construct
  misc_feature 1..21: note = Synthetic
  source 1..21: mol_type = other DNA
catttaagaaatttaattgat

SEQ ID NO: 11686 - DNA, 21 bp, synthetic construct
  misc_feature 1..21: note = Synthetic
  source 1..21: mol_type = other DNA
catttacgtgctccgaaacca

SEQ ID NO: 11687 - DNA, 21 bp, synthetic construct
  misc_feature 1..21: note = Synthetic
  source 1..21: mol_type = other DNA
catttcagaggcaataacccc

SEQ ID NO: 11688 - DNA, 21 bp, synthetic construct
  misc_feature 1..21: note = Synthetic
  source 1..21: mol_type = other DNA
catttcccgtcttggcactgg

SEQ ID NO: 11689 - DNA, 21 bp, synthetic construct
  misc_feature 1..21: note = Synthetic
  source 1..21: mol_type = other DNA
catttccgacgccatgaatcc

SEQ ID NO: 11690 - DNA, 21 bp, synthetic construct
  misc_feature 1..21: note = Synthetic
  source 1..21: mol_type = other DNA
catttcctctgccagcaacgt

SEQ ID NO: 11691 - DNA, 21 bp, synthetic construct
  misc_feature 1..21: note = Synthetic
  source 1..21: mol_type = other DNA
catttgcatagaagtggaagc

SEQ ID NO: 11692 - DNA, 21 bp, synthetic construct
  misc_feature 1..21: note = Synthetic
  source 1..21: mol_type = other DNA
catttggtgaatgagtttggt

SEQ ID NO: 11693 - DNA, 21 bp, synthetic construct
  misc_feature 1..21: note = Synthetic
  source 1..21: mol_type = other DNA
cattttttaagagatggggtc

SEQ ID NO: 11694 - DNA, 21 bp, synthetic construct
  misc_feature 1..21: note = Synthetic
  source 1..21: mol_type = other DNA
ccaaaaagcgttgcacacagt

SEQ ID NO: 11695 - DNA, 21 bp, synthetic construct
  misc_feature 1..21: note = Synthetic
  source 1..21: mol_type = other DNA
ccaaaatactttgtcctcaaa

SEQ ID NO: 11696 - DNA, 21 bp, synthetic construct
  misc_feature 1..21: note = Synthetic
  source 1..21: mol_type = other DNA
ccaaaatcccaacccaagcca

SEQ ID NO: 11697 - DNA, 21 bp, synthetic construct
  misc_feature 1..21: note = Synthetic
  source 1..21: mol_type = other DNA
ccaaagtgctgggattacagg

SEQ ID NO: 11698 - DNA, 21 bp, synthetic construct
  misc_feature 1..21: note = Synthetic
  source 1..21: mol_type = other DNA
ccaaatgtacacagtgtacaa

SEQ ID NO: 11699 - DNA, 21 bp, synthetic construct
  misc_feature 1..21: note = Synthetic
  source 1..21: mol_type = other DNA
ccaaattcattttttaagaga

SEQ ID NO: 11700 - DNA, 21 bp, synthetic construct
  misc_feature 1..21: note = Synthetic
  source 1..21: mol_type = other DNA
ccaacaagttgacatcggaac

SEQ ID NO: 11701 - DNA, 21 bp, synthetic construct
  misc_feature 1..21: note = Synthetic
  source 1..21: mol_type = other DNA
ccaacacacacgacagaaaac

SEQ ID NO: 11702 - DNA, 21 bp, synthetic construct
  misc_feature 1..21: note = Synthetic
  source 1..21: mol_type = other DNA
ccaacccaagccattgcatgg

SEQ ID NO: 11703 - DNA, 21 bp, synthetic construct
  misc_feature 1..21: note = Synthetic
  source 1..21: mol_type = other DNA
ccaactcctgaactcaagtga

SEQ ID NO: 11704 - DNA, 21 bp, synthetic construct
  misc_feature 1..21: note = Synthetic
  source 1..21: mol_type = other DNA
ccaacttcatcgctcatgtcc

SEQ ID NO: 11705 - DNA, 21 bp, synthetic construct
  misc_feature 1..21: note = Synthetic
  source 1..21: mol_type = other DNA
ccaagatggtcttccggttgc

SEQ ID NO: 11706 - DNA, 21 bp, synthetic construct
  misc_feature 1..21: note = Synthetic
  source 1..21: mol_type = other DNA
ccaagcagtcccggtctgagt

SEQ ID NO: 11707 - DNA, 21 bp, synthetic construct
  misc_feature 1..21: note = Synthetic
  source 1..21: mol_type = other DNA
ccaagcattcgttggtcccgc

SEQ ID NO: 11708 - DNA, 21 bp, synthetic construct
  misc_feature 1..21: note = Synthetic
  source 1..21: mol_type = other DNA
ccaagccattgcatgggcact

SEQ ID NO: 11709 - DNA, 21 bp, synthetic construct
  misc_feature 1..21: note = Synthetic
  source 1..21: mol_type = other DNA
ccaaggagaaggggtgggcca

SEQ ID NO: 11710 - DNA, 21 bp, synthetic construct
  misc_feature 1..21: note = Synthetic
  source 1..21: mol_type = other DNA
ccaaggaggggcggggagatt

SEQ ID NO: 11711 - DNA, 21 bp, synthetic construct
  misc_feature 1..21: note = Synthetic
  source 1..21: mol_type = other DNA
ccaaggtaaccgggtgtctca

SEQ ID NO: 11712 - DNA, 21 bp, synthetic construct
  misc_feature 1..21: note = Synthetic
  source 1..21: mol_type = other DNA
ccaagtagctgggatcacagg

SEQ ID NO: 11713 - DNA, 21 bp, synthetic construct
  misc_feature 1..21: note = Synthetic
  source 1..21: mol_type = other DNA
ccaatatacaaagtgcaaaca

SEQ ID NO: 11714 - DNA, 21 bp, synthetic construct
  misc_feature 1..21: note = Synthetic
  source 1..21: mol_type = other DNA
ccaatcccttgtgacatcttc

SEQ ID NO: 11715 - DNA, 21 bp, synthetic construct
  misc_feature 1..21: note = Synthetic
  source 1..21: mol_type = other DNA
ccacaccattcaggccccctt

SEQ ID NO: 11716 - DNA, 21 bp, synthetic construct
  misc_feature 1..21: note = Synthetic
  source 1..21: mol_type = other DNA
ccacacctgggtgcaggccac

SEQ ID NO: 11717 - DNA, 21 bp, synthetic construct
  misc_feature 1..21: note = Synthetic
  source 1..21: mol_type = other DNA
ccacagagcacagcggaaacc

SEQ ID NO: 11718 - DNA, 21 bp, synthetic construct
  misc_feature 1..21: note = Synthetic
  source 1..21: mol_type = other DNA
ccacagccagcccgtcggggg

SEQ ID NO: 11719 - DNA, 21 bp, synthetic construct
  misc_feature 1..21: note = Synthetic
  source 1..21: mol_type = other DNA
ccacagccttgcaggccttcg

SEQ ID NO: 11720 - DNA, 21 bp, synthetic construct
  misc_feature 1..21: note = Synthetic
  source 1..21: mol_type = other DNA
ccacagcgcagttttcctcgt

SEQ ID NO: 11721 - DNA, 21 bp, synthetic construct
  misc_feature 1..21: note = Synthetic
  source 1..21: mol_type = other DNA
ccacagctgaagtccccggat

SEQ ID NO: 11722 - DNA, 21 bp, synthetic construct
  misc_feature 1..21: note = Synthetic
  source 1..21: mol_type = other DNA
ccacagctgggggatgcaggt

SEQ ID NO: 11723 - DNA, 21 bp, synthetic construct
  misc_feature 1..21: note = Synthetic
  source 1..21: mol_type = other DNA
ccacaggacagccttgctcgt

SEQ ID NO: 11724 - DNA, 21 bp, synthetic construct
  misc_feature 1..21: note = Synthetic
  source 1..21: mol_type = other DNA
ccacaggtgagcaccgggcag

SEQ ID NO: 11725 - DNA, 21 bp, synthetic construct
  misc_feature 1..21: note = Synthetic
  source 1..21: mol_type = other DNA
ccaccacgatggcccttggct

SEQ ID NO: 11726 - DNA, 21 bp, synthetic construct
  misc_feature 1..21: note = Synthetic
  source 1..21: mol_type = other DNA
ccaccacgcccggctaatttt

SEQ ID NO: 11727 - DNA, 21 bp, synthetic construct
  misc_feature 1..21: note = Synthetic
  source 1..21: mol_type = other DNA
ccaccacggattcagccagat

SEQ ID NO: 11728 - DNA, 21 bp, synthetic construct
  misc_feature 1..21: note = Synthetic
  source 1..21: mol_type = other DNA
ccaccagctggaagccgtcgg

SEQ ID NO: 11729 - DNA, 21 bp, synthetic construct
  misc_feature 1..21: note = Synthetic
  source 1..21: mol_type = other DNA
ccaccatcacagcgccagctg

SEQ ID NO: 11730 - DNA, 21 bp, synthetic construct
  misc_feature 1..21: note = Synthetic
  source 1..21: mol_type = other DNA
ccacccgcctcggcctcccaa

SEQ ID NO: 11731 - DNA, 21 bp, synthetic construct
  misc_feature 1..21: note = Synthetic
  source 1..21: mol_type = other DNA
ccaccctccaggttcacgcag

SEQ ID NO: 11732 - DNA, 21 bp, synthetic construct
  misc_feature 1..21: note = Synthetic
  source 1..21: mol_type = other DNA
ccaccgtacccagctgatttt

SEQ ID NO: 11733 - DNA, 21 bp, synthetic construct
  misc_feature 1..21: note = Synthetic
  source 1..21: mol_type = other DNA
ccaccgtggtgagcccagggg

SEQ ID NO: 11734 - DNA, 21 bp, synthetic construct
  misc_feature 1..21: note = Synthetic
  source 1..21: mol_type = other DNA
ccacctcagcctcgccatgcc

SEQ ID NO: 11735 - DNA, 21 bp, synthetic construct
  misc_feature 1..21: note = Synthetic
  source 1..21: mol_type = other DNA
ccacctccgtgtccagagcga

SEQ ID NO: 11736 - DNA, 21 bp, synthetic construct
  misc_feature 1..21: note = Synthetic
  source 1..21: mol_type = other DNA
ccacctcctgggctcaggcga

SEQ ID NO: 11737 - DNA, 21 bp, synthetic construct
  misc_feature 1..21: note = Synthetic
  source 1..21: mol_type = other DNA
ccacctcgaaagacactgggt

SEQ ID NO: 11738 - DNA, 21 bp, synthetic construct
  misc_feature 1..21: note = Synthetic
  source 1..21: mol_type = other DNA
ccacgatggcccttggcttgg

SEQ ID NO: 11739 - DNA, 21 bp, synthetic construct
  misc_feature 1..21: note = Synthetic
  source 1..21: mol_type = other DNA
ccacgcccggctaattttttg

SEQ ID NO: 11740 - DNA, 21 bp, synthetic construct
  misc_feature 1..21: note = Synthetic
  source 1..21: mol_type = other DNA
ccacggattcagccagatcat

SEQ ID NO: 11741 - DNA, 21 bp, synthetic construct
  misc_feature 1..21: note = Synthetic
  source 1..21: mol_type = other DNA
ccacgggaatggaagtgggta

SEQ ID NO: 11742 - DNA, 21 bp, synthetic construct
  misc_feature 1..21: note = Synthetic
  source 1..21: mol_type = other DNA
ccacgtcatcctccagactga

SEQ ID NO: 11743 - DNA, 21 bp, synthetic construct
  misc_feature 1..21: note = Synthetic
  source 1..21: mol_type = other DNA
ccacgtggctgaagatctcgg

SEQ ID NO: 11744 - DNA, 21 bp, synthetic construct
  misc_feature 1..21: note = Synthetic
  source 1..21: mol_type = other DNA
ccacgtgtcctcacggccaag

SEQ ID NO: 11745 - DNA, 21 bp, synthetic construct
  misc_feature 1..21: note = Synthetic
  source 1..21: mol_type = other DNA
ccacgttcctcaggttgggga

SEQ ID NO: 11746 - DNA, 21 bp, synthetic construct
  misc_feature 1..21: note = Synthetic
  source 1..21: mol_type = other DNA
ccactatctgtacagggacgc

SEQ ID NO: 11747 - DNA, 21 bp, synthetic construct
  misc_feature 1..21: note = Synthetic
  source 1..21: mol_type = other DNA
ccactcatacatacaacgggg

SEQ ID NO: 11748 - DNA, 21 bp, synthetic construct
  misc_feature 1..21: note = Synthetic
  source 1..21: mol_type = other DNA
ccactcatccgagccatcttc

SEQ ID NO: 11749 - DNA, 21 bp, synthetic construct
  misc_feature 1..21: note = Synthetic
  source 1..21: mol_type = other DNA
ccactgaatgttttcagtcac

SEQ ID NO: 11750 - DNA, 21 bp, synthetic construct
  misc_feature 1..21: note = Synthetic
  source 1..21: mol_type = other DNA
ccactgaggagatctagggtg

SEQ ID NO: 11751 - DNA, 21 bp, synthetic construct
  misc_feature 1..21: note = Synthetic
  source 1..21: mol_type = other DNA
ccactgcagcctcagcctctc

SEQ ID NO: 11752 - DNA, 21 bp, synthetic construct
  misc_feature 1..21: note = Synthetic
  source 1..21: mol_type = other DNA
ccactgcagcctcagcctctg

SEQ ID NO: 11753 - DNA, 21 bp, synthetic construct
  misc_feature 1..21: note = Synthetic
  source 1..21: mol_type = other DNA
ccactgcagtccccgccgcgg

SEQ ID NO: 11754 - DNA, 21 bp, synthetic construct
  misc_feature 1..21: note = Synthetic
  source 1..21: mol_type = other DNA
ccactgcgcccggcctcaccg

SEQ ID NO: 11755 - DNA, 21 bp, synthetic construct
  misc_feature 1..21: note = Synthetic
  source 1..21: mol_type = other DNA
ccacttaggcagtggaactcg

SEQ ID NO: 11756 - DNA, 21 bp, synthetic construct
  misc_feature 1..21: note = Synthetic
  source 1..21: mol_type = other DNA
ccacttgcttctctgggcctg

SEQ ID NO: 11757 - DNA, 21 bp, synthetic construct
  misc_feature 1..21: note = Synthetic
  source 1..21: mol_type = other DNA
ccacttggccatcgcacctcc

SEQ ID NO: 11758 - DNA, 21 bp, synthetic construct
  misc_feature 1..21: note = Synthetic
  source 1..21: mol_type = other DNA
ccacttgtaggagatgcattt

SEQ ID NO: 11759 - DNA, 21 bp, synthetic construct
  misc_feature 1..21: note = Synthetic
  source 1..21: mol_type = other DNA
ccagaaaggcttatcacggtt

SEQ ID NO: 11760 - DNA, 21 bp, synthetic construct
  misc_feature 1..21: note = Synthetic
  source 1..21: mol_type = other DNA
ccagaactgaggaatgcagcg

SEQ ID NO: 11761 - DNA, 21 bp, synthetic construct
  misc_feature 1..21: note = Synthetic
  source 1..21: mol_type = other DNA
ccagaagccactcatacatac

SEQ ID NO: 11762 - DNA, 21 bp, synthetic construct
  misc_feature 1..21: note = Synthetic
  source 1..21: mol_type = other DNA
ccagactgaccatcgaggggt

SEQ ID NO: 11763 - DNA, 21 bp, synthetic construct
  misc_feature 1..21: note = Synthetic
  source 1..21: mol_type = other DNA
ccagactgaccatctgtctcg

SEQ ID NO: 11764 - DNA, 21 bp, synthetic construct
  misc_feature 1..21: note = Synthetic
  source 1..21: mol_type = other DNA
ccagactgcggactgcagtgg

SEQ ID NO: 11765 - DNA, 21 bp, synthetic construct
  misc_feature 1..21: note = Synthetic
  source 1..21: mol_type = other DNA
ccagactggaggatttattta

SEQ ID NO: 11766 - DNA, 21 bp, synthetic construct
  misc_feature 1..21: note = Synthetic
  source 1..21: mol_type = other DNA
ccagagacccagctccgtggc

SEQ ID NO: 11767 - DNA, 21 bp, synthetic construct
  misc_feature 1..21: note = Synthetic
  source 1..21: mol_type = other DNA
ccagagcgaccacgttcctca

SEQ ID NO: 11768 - DNA, 21 bp, synthetic construct
  misc_feature 1..21: note = Synthetic
  source 1..21: mol_type = other DNA
ccagagcttggtgagacattg

SEQ ID NO: 11769 - DNA, 21 bp, synthetic construct
  misc_feature 1..21: note = Synthetic
  source 1..21: mol_type = other DNA
ccagaggccatgggctgctga

SEQ ID NO: 11770 - DNA, 21 bp, synthetic construct
  misc_feature 1..21: note = Synthetic
  source 1..21: mol_type = other DNA
ccagatcatttccgacgccat

SEQ ID NO: 11771 - DNA, 21 bp, synthetic construct
  misc_feature 1..21: note = Synthetic
  source 1..21: mol_type = other DNA
ccagatgaataaatatataaa

SEQ ID NO: 11772 - DNA, 21 bp, synthetic construct
  misc_feature 1..21: note = Synthetic
  source 1..21: mol_type = other DNA
ccagcaacgtcgcccagagct

SEQ ID NO: 11773 - DNA, 21 bp, synthetic construct
  misc_feature 1..21: note = Synthetic
  source 1..21: mol_type = other DNA
ccagcagcatgccgtccgggc

SEQ ID NO: 11774 - DNA, 21 bp, synthetic construct
  misc_feature 1..21: note = Synthetic
  source 1..21: mol_type = other DNA
ccagccccagggccccatgct

SEQ ID NO: 11775 - DNA, 21 bp, synthetic construct
  misc_feature 1..21: note = Synthetic
  source 1..21: mol_type = other DNA
ccagcccgtcgggggcctgga

SEQ ID NO: 11776 - DNA, 21 bp, synthetic construct
  misc_feature 1..21: note = Synthetic
  source 1..21: mol_type = other DNA
ccagcctcttttcatcctcca

SEQ ID NO: 11777 - DNA, 21 bp, synthetic construct
  misc_feature 1..21: note = Synthetic
  source 1..21: mol_type = other DNA
ccagcgagtagatgtccacac

SEQ ID NO: 11778 - DNA, 21 bp, synthetic construct
  misc_feature 1..21: note = Synthetic
  source 1..21: mol_type = other DNA
ccagcgcaatttccagcccca

SEQ ID NO: 11779 - DNA, 21 bp, synthetic construct
  misc_feature 1..21: note = Synthetic
  source 1..21: mol_type = other DNA
ccagcgtcatcttcctgacct

SEQ ID NO: 11780 - DNA, 21 bp, synthetic construct
  misc_feature 1..21: note = Synthetic
  source 1..21: mol_type = other DNA
ccagctcagcctcccaaagtg

SEQ ID NO: 11781 - DNA, 21 bp, synthetic construct
  misc_feature 1..21: note = Synthetic
  source 1..21: mol_type = other DNA
ccagctccgtggcgatgggga

SEQ ID NO: 11782 - DNA, 21 bp, synthetic construct
  misc_feature 1..21: note = Synthetic
  source 1..21: mol_type = other DNA
ccagctgatttttaacttttt

SEQ ID NO: 11783 - DNA, 21 bp, synthetic construct
  misc_feature 1..21: note = Synthetic
  source 1..21: mol_type = other DNA
ccagctggaagccgtcggggc

SEQ ID NO: 11784 - DNA, 21 bp, synthetic construct
  misc_feature 1..21: note = Synthetic
  source 1..21: mol_type = other DNA
ccagctggaagccttcctcac

SEQ ID NO: 11785 - DNA, 21 bp, synthetic construct
  misc_feature 1..21: note = Synthetic
  source 1..21: mol_type = other DNA
ccagctggagtggatgcactc

SEQ ID NO: 11786 - DNA, 21 bp, synthetic construct
  misc_feature 1..21: note = Synthetic
  source 1..21: mol_type = other DNA
ccaggacaaggtggggacgga

SEQ ID NO: 11787 - DNA, 21 bp, synthetic construct
  misc_feature 1..21: note = Synthetic
  source 1..21: mol_type = other DNA
ccaggacagagtcggtccagt

SEQ ID NO: 11788 - DNA, 21 bp, synthetic construct
  misc_feature 1..21: note = Synthetic
  source 1..21: mol_type = other DNA
ccaggagggcccaggataacg

SEQ ID NO: 11789 - DNA, 21 bp, synthetic construct
  misc_feature 1..21: note = Synthetic
  source 1..21: mol_type = other DNA
ccaggataacggagggcgact

SEQ ID NO: 11790 - DNA, 21 bp, synthetic construct
  misc_feature 1..21: note = Synthetic
  source 1..21: mol_type = other DNA
ccaggatggtctcgatctcct

SEQ ID NO: 11791 - DNA, 21 bp, synthetic construct
  misc_feature 1..21: note = Synthetic
  source 1..21: mol_type = other DNA
ccaggcaaaggaagacgagga

SEQ ID NO: 11792 - DNA, 21 bp, synthetic construct
  misc_feature 1..21: note = Synthetic
  source 1..21: mol_type = other DNA
ccaggcagatgttcacgccac

SEQ ID NO: 11793 - DNA, 21 bp, synthetic construct
  misc_feature 1..21: note = Synthetic
  source 1..21: mol_type = other DNA
ccaggcagccgggaggtgtcg

SEQ ID NO: 11794 - DNA, 21 bp, synthetic construct
  misc_feature 1..21: note = Synthetic
  source 1..21: mol_type = other DNA
ccaggcagtgtcccgacccgg

SEQ ID NO: 11795 - DNA, 21 bp, synthetic construct
  misc_feature 1..21: note = Synthetic
  source 1..21: mol_type = other DNA
ccaggccagactgcggactgc

SEQ ID NO: 11796 - DNA, 21 bp, synthetic construct
  misc_feature 1..21: note = Synthetic
  source 1..21: mol_type = other DNA
ccaggctggaaagcagtggca

SEQ ID NO: 11797 - DNA, 21 bp, synthetic construct
  misc_feature 1..21: note = Synthetic
  source 1..21: mol_type = other DNA
ccaggctggagtgcagtggct

SEQ ID NO: 11798 - DNA, 21 bp, synthetic construct
  misc_feature 1..21: note = Synthetic
  source 1..21: mol_type = other DNA
ccaggctggtgtcctgacagc

SEQ ID NO: 11799 - DNA, 21 bp, synthetic construct
  misc_feature 1..21: note = Synthetic
  source 1..21: mol_type = other DNA
ccagggccccatgctcgcagc

SEQ ID NO: 11800 - DNA, 21 bp, synthetic construct
  misc_feature 1..21: note = Synthetic
  source 1..21: mol_type = other DNA
ccagggggtcccgttggtgcc

SEQ ID NO: 11801 - DNA, 21 bp, synthetic construct
  misc_feature 1..21: note = Synthetic
  source 1..21: mol_type = other DNA
ccaggggtggccccaggcagc

SEQ ID NO: 11802 - DNA, 21 bp, synthetic construct
  misc_feature 1..21: note = Synthetic
  source 1..21: mol_type = other DNA
ccagggtgatgcattcgccgc

SEQ ID NO: 11803 - DNA, 21 bp, synthetic construct
  misc_feature 1..21: note = Synthetic
  source 1..21: mol_type = other DNA
ccagggtttgcaaaaataaat

SEQ ID NO: 11804 - DNA, 21 bp, synthetic construct
  misc_feature 1..21: note = Synthetic
  source 1..21: mol_type = other DNA
ccaggttcacgcagagctggc

SEQ ID NO: 11805 - DNA, 21 bp, synthetic construct
  misc_feature 1..21: note = Synthetic
  source 1..21: mol_type = other DNA
ccagtacatgaagccatgaac

SEQ ID NO: 11806 - DNA, 21 bp, synthetic construct
  misc_feature 1..21: note = Synthetic
  source 1..21: mol_type = other DNA
ccagtagaggcggccactgag

SEQ ID NO: 11807 - DNA, 21 bp, synthetic construct
  misc_feature 1..21: note = Synthetic
  source 1..21: mol_type = other DNA
ccagtagatgttgctgtggat

SEQ ID NO: 11808 - DNA, 21 bp, synthetic construct
  misc_feature 1..21: note = Synthetic
  source 1..21: mol_type = other DNA
ccagtagattctattgctggc

SEQ ID NO: 11809 - DNA, 21 bp, synthetic construct
  misc_feature 1..21: note = Synthetic
  source 1..21: mol_type = other DNA
ccagtcagtccagtacatgaa

SEQ ID NO: 11810 - DNA, 21 bp, synthetic construct
  misc_feature 1..21: note = Synthetic
  source 1..21: mol_type = other DNA
ccagtccacagccagcccgtc

SEQ ID NO: 11811 - DNA, 21 bp, synthetic construct
  misc_feature 1..21: note = Synthetic
  source 1..21: mol_type = other DNA
ccagtcccggcagtctctagc

SEQ ID NO: 11812 - DNA, 21 bp, synthetic construct
  misc_feature 1..21: note = Synthetic
  source 1..21: mol_type = other DNA
ccagtgactcaggctctgcct

SEQ ID NO: 11813 - DNA, 21 bp, synthetic construct
  misc_feature 1..21: note = Synthetic
  source 1..21: mol_type = other DNA
ccagttcactcctcttggctg

SEQ ID NO: 11814 - DNA, 21 bp, synthetic construct
  misc_feature 1..21: note = Synthetic
  source 1..21: mol_type = other DNA
ccagttcgtgcaaataatctt

SEQ ID NO: 11815 - DNA, 21 bp, synthetic construct
  misc_feature 1..21: note = Synthetic
  source 1..21: mol_type = other DNA
ccagttcttccatagaaggaa

SEQ ID NO: 11816 - DNA, 21 bp, synthetic construct
  misc_feature 1..21: note = Synthetic
  source 1..21: mol_type = other DNA
ccatagaaggaagacccccag

SEQ ID NO: 11817 - DNA, 21 bp, synthetic construct
  misc_feature 1..21: note = Synthetic
  source 1..21: mol_type = other DNA
ccatatcctctggggacagta

SEQ ID NO: 11818 - DNA, 21 bp, synthetic construct
  misc_feature 1..21: note = Synthetic
  source 1..21: mol_type = other DNA
ccatcaacgacaagattgggg

SEQ ID NO: 11819 - DNA, 21 bp, synthetic construct
  misc_feature 1..21: note = Synthetic
  source 1..21: mol_type = other DNA
ccatcacagcgccagctggag

SEQ ID NO: 11820 - DNA, 21 bp, synthetic construct
  misc_feature 1..21: note = Synthetic
  source 1..21: mol_type = other DNA
ccatcagagcactggaattcg

SEQ ID NO: 11821 - DNA, 21 bp, synthetic construct
  misc_feature 1..21: note = Synthetic
  source 1..21: mol_type = other DNA
ccatcccaacacacacgacag

SEQ ID NO: 11822 - DNA, 21 bp, synthetic construct
  misc_feature 1..21: note = Synthetic
  source 1..21: mol_type = other DNA
ccatcctcccacctcagcctc

SEQ ID NO: 11823 - DNA, 21 bp, synthetic construct
  misc_feature 1..21: note = Synthetic
  source 1..21: mol_type = other DNA
ccatcctggcactcagcgctg

SEQ ID NO: 11824 - DNA, 21 bp, synthetic construct
  misc_feature 1..21: note = Synthetic
  source 1..21: mol_type = other DNA
ccatcgaggggtagctgtagc

SEQ ID NO: 11825 - DNA, 21 bp, synthetic construct
  misc_feature 1..21: note = Synthetic
  source 1..21: mol_type = other DNA
ccatcgcacctccagaactga

SEQ ID NO: 11826 - DNA, 21 bp, synthetic construct
  misc_feature 1..21: note = Synthetic
  source 1..21: mol_type = other DNA
ccatcgcagacccacttgtag

SEQ ID NO: 11827 - DNA, 21 bp, synthetic construct
  misc_feature 1..21: note = Synthetic
  source 1..21: mol_type = other DNA
ccatcgtggcagcgaaactcg

SEQ ID NO: 11828 - DNA, 21 bp, synthetic construct
  misc_feature 1..21: note = Synthetic
  source 1..21: mol_type = other DNA
ccatctcccagaagccactca

SEQ ID NO: 11829 - DNA, 21 bp, synthetic construct
  misc_feature 1..21: note = Synthetic
  source 1..21: mol_type = other DNA
ccatctgctgttgtgtgttga

SEQ ID NO: 11830 - DNA, 21 bp, synthetic construct
  misc_feature 1..21: note = Synthetic
  source 1..21: mol_type = other DNA
ccatctgtctcgaggggtagc

SEQ ID NO: 11831 - DNA, 21 bp, synthetic construct
  misc_feature 1..21: note = Synthetic
  source 1..21: mol_type = other DNA
ccatcttcgcagtcggggtcg

SEQ ID NO: 11832 - DNA, 21 bp, synthetic construct
  misc_feature 1..21: note = Synthetic
  source 1..21: mol_type = other DNA
ccatgaacaggatccaccacg

SEQ ID NO: 11833 - DNA, 21 bp, synthetic construct
  misc_feature 1..21: note = Synthetic
  source 1..21: mol_type = other DNA
ccatgaatccctttcctggct

SEQ ID NO: 11834 - DNA, 21 bp, synthetic construct
  misc_feature 1..21: note = Synthetic
  source 1..21: mol_type = other DNA
ccatgcatggtttttttttgt

SEQ ID NO: 11835 - DNA, 21 bp, synthetic construct
  misc_feature 1..21: note = Synthetic
  source 1..21: mol_type = other DNA
ccatgcctggccagaggccat

SEQ ID NO: 11836 - DNA, 21 bp, synthetic construct
  misc_feature 1..21: note = Synthetic
  source 1..21: mol_type = other DNA
ccatgctcgcagcctctgcca

SEQ ID NO: 11837 - DNA, 21 bp, synthetic construct
  misc_feature 1..21: note = Synthetic
  source 1..21: mol_type = other DNA
ccatggatgcagtttccatca

SEQ ID NO: 11838 - DNA, 21 bp, synthetic construct
  misc_feature 1..21: note = Synthetic
  source 1..21: mol_type = other DNA
ccatgggctgctgatgcacca

SEQ ID NO: 11839 - DNA, 21 bp, synthetic construct
  misc_feature 1..21: note = Synthetic
  source 1..21: mol_type = other DNA
ccatgttgcagactttgtcca

SEQ ID NO: 11840 - DNA, 21 bp, synthetic construct
  misc_feature 1..21: note = Synthetic
  source 1..21: mol_type = other DNA
ccatgtttgaggattgtgtca

SEQ ID NO: 11841 - DNA, 21 bp, synthetic construct
  misc_feature 1..21: note = Synthetic
  source 1..21: mol_type = other DNA
ccattcaggccccctttcttg

SEQ ID NO: 11842 - DNA, 21 bp, synthetic construct
  misc_feature 1..21: note = Synthetic
  source 1..21: mol_type = other DNA
ccattctcctgcctcagcctc

SEQ ID NO: 11843 - DNA, 21 bp, synthetic construct
  misc_feature 1..21: note = Synthetic
  source 1..21: mol_type = other DNA
ccattgcatgggcactgtccg

SEQ ID NO: 11844 - DNA, 21 bp, synthetic construct
  misc_feature 1..21: note = Synthetic
  source 1..21: mol_type = other DNA
ccattgctcagggtggtcctc

SEQ ID NO: 11845 - DNA, 21 bp, synthetic construct
  misc_feature 1..21: note = Synthetic
  source 1..21: mol_type = other DNA
ccattgggccactgaatgttt

SEQ ID NO: 11846 - DNA, 21 bp, synthetic construct
  misc_feature 1..21: note = Synthetic
  source 1..21: mol_type = other DNA
cccaaaaagcgttgcacacag

SEQ ID NO: 11847 - DNA, 21 bp, synthetic construct
  misc_feature 1..21: note = Synthetic
  source 1..21: mol_type = other DNA
cccaaagtgctgggattacag

SEQ ID NO: 11848 - DNA, 21 bp, synthetic construct
  misc_feature 1..21: note = Synthetic
  source 1..21: mol_type = other DNA
cccaacacacacgacagaaaa

SEQ ID NO: 11849 - DNA, 21 bp, synthetic construct
  misc_feature 1..21: note = Synthetic
  source 1..21: mol_type = other DNA
cccaacccaagccattgcatg

SEQ ID NO: 11850 - DNA, 21 bp, synthetic construct
  misc_feature 1..21: note = Synthetic
  source 1..21: mol_type = other DNA
cccaagccattgcatgggcac

SEQ ID NO: 11851 - DNA, 21 bp, synthetic construct
  misc_feature 1..21: note = Synthetic
  source 1..21: mol_type = other DNA
cccaagtagctgggatcacag

SEQ ID NO: 11852 - DNA, 21 bp, synthetic construct
  misc_feature 1..21: note = Synthetic
  source 1..21: mol_type = other DNA
cccacagccttgcaggccttc

SEQ ID NO: 11853 - DNA, 21 bp, synthetic construct
  misc_feature 1..21: note = Synthetic
  source 1..21: mol_type = other DNA
cccacagctgaagtccccgga

SEQ ID NO: 11854 - DNA, 21 bp, synthetic construct
  misc_feature 1..21: note = Synthetic
  source 1..21: mol_type = other DNA
cccacagctgggggatgcagg

SEQ ID NO: 11855 - DNA, 21 bp, synthetic construct
  misc_feature 1..21: note = Synthetic
  source 1..21: mol_type = other DNA
cccacctcagcctcgccatgc

SEQ ID NO: 11856 - DNA, 21 bp, synthetic construct
  misc_feature 1..21: note = Synthetic
  source 1..21: mol_type = other DNA
cccacctcgaaagacactggg

SEQ ID NO: 11857 - DNA, 21 bp, synthetic construct
  misc_feature 1..21: note = Synthetic
  source 1..21: mol_type = other DNA
cccacgtggctgaagatctcg

SEQ ID NO: 11858 - DNA, 21 bp, synthetic construct
  misc_feature 1..21: note = Synthetic
  source 1..21: mol_type = other DNA
cccactatctgtacagggacg

SEQ ID NO: 11859 - DNA, 21 bp, synthetic construct
  misc_feature 1..21: note = Synthetic
  source 1..21: mol_type = other DNA
cccactgcagtccccgccgcg

SEQ ID NO: 11860 - DNA, 21 bp, synthetic construct
  misc_feature 1..21: note = Synthetic
  source 1..21: mol_type = other DNA
cccacttgtaggagatgcatt

SEQ ID NO: 11861 - DNA, 21 bp, synthetic construct
  misc_feature 1..21: note = Synthetic
  source 1..21: mol_type = other DNA
cccagaagccactcatacata

SEQ ID NO: 11862 - DNA, 21 bp, synthetic construct
  misc_feature 1..21: note = Synthetic
  source 1..21: mol_type = other DNA
cccagagcttggtgagacatt

SEQ ID NO: 11863 - DNA, 21 bp, synthetic construct
  misc_feature 1..21: note = Synthetic
  source 1..21: mol_type = other DNA
cccagatgaataaatatataa

SEQ ID NO: 11864 - DNA, 21 bp, synthetic construct
  misc_feature 1..21: note = Synthetic
  source 1..21: mol_type = other DNA
cccagctccgtggcgatgggg

SEQ ID NO: 11865 - DNA, 21 bp, synthetic construct
  misc_feature 1..21: note = Synthetic
  source 1..21: mol_type = other DNA
cccagctgatttttaactttt

SEQ ID NO: 11866 - DNA, 21 bp, synthetic construct
  misc_feature 1..21: note = Synthetic
  source 1..21: mol_type = other DNA
cccaggacaaggtggggacgg

SEQ ID NO: 11867 - DNA, 21 bp, synthetic construct
  misc_feature 1..21: note = Synthetic
  source 1..21: mol_type = other DNA
cccaggacagagtcggtccag

SEQ ID NO: 11868 - DNA, 21 bp, synthetic construct
  misc_feature 1..21: note = Synthetic
  source 1..21: mol_type = other DNA
cccaggataacggagggcgac

SEQ ID NO: 11869 - DNA, 21 bp, synthetic construct
  misc_feature 1..21: note = Synthetic
  source 1..21: mol_type = other DNA
cccaggcaaaggaagacgagg

SEQ ID NO: 11870 - DNA, 21 bp, synthetic construct
  misc_feature 1..21: note = Synthetic
  source 1..21: mol_type = other DNA
cccaggcagccgggaggtgtc

SEQ ID NO: 11871 - DNA, 21 bp, synthetic construct
  misc_feature 1..21: note = Synthetic
  source 1..21: mol_type = other DNA
cccaggccagactgcggactg

SEQ ID NO: 11872 - DNA, 21 bp, synthetic construct
  misc_feature 1..21: note = Synthetic
  source 1..21: mol_type = other DNA
cccaggctggaaagcagtggc

SEQ ID NO: 11873 - DNA, 21 bp, synthetic construct
  misc_feature 1..21: note = Synthetic
  source 1..21: mol_type = other DNA
cccaggctggagtgcagtggc

SEQ ID NO: 11874 - DNA, 21 bp, synthetic construct
  misc_feature 1..21: note = Synthetic
  source 1..21: mol_type = other DNA
cccagggccccatgctcgcag

SEQ ID NO: 11875 - DNA, 21 bp, synthetic construct
  misc_feature 1..21: note = Synthetic
  source 1..21: mol_type = other DNA
cccaggggtggccccaggcag

SEQ ID NO: 11876 - DNA, 21 bp, synthetic construct
  misc_feature 1..21: note = Synthetic
  source 1..21: mol_type = other DNA
cccagtagaggcggccactga

SEQ ID NO: 11877 - DNA, 21 bp, synthetic construct
  misc_feature 1..21: note = Synthetic
  source 1..21: mol_type = other DNA
cccagtcagtccagtacatga

SEQ ID NO: 11878 - DNA, 21 bp, synthetic construct
  misc_feature 1..21: note = Synthetic
  source 1..21: mol_type = other DNA
cccatcaacgacaagattggg

SEQ ID NO: 11879 - DNA, 21 bp, synthetic construct
  misc_feature 1..21: note = Synthetic
  source 1..21: mol_type = other DNA
cccatcccaacacacacgaca

SEQ ID NO: 11880 - DNA, 21 bp, synthetic construct
  misc_feature 1..21: note = Synthetic
  source 1..21: mol_type = other DNA
cccatcgtggcagcgaaactc

SEQ ID NO: 11881 - DNA, 21 bp, synthetic construct
  misc_feature 1..21: note = Synthetic
  source 1..21: mol_type = other DNA
cccatctcccagaagccactc

SEQ ID NO: 11882 - DNA, 21 bp, synthetic construct
  misc_feature 1..21: note = Synthetic
  source 1..21: mol_type = other DNA
cccatgctcgcagcctctgcc

SEQ ID NO: 11883 - DNA, 21 bp, synthetic construct
  misc_feature 1..21: note = Synthetic
  source 1..21: mol_type = other DNA
ccccacagctgaagtccccgg

SEQ ID NO: 11884 - DNA, 21 bp, synthetic construct
  misc_feature 1..21: note = Synthetic
  source 1..21: mol_type = other DNA
ccccactatctgtacagggac

SEQ ID NO: 11885 - DNA, 21 bp, synthetic construct
  misc_feature 1..21: note = Synthetic
  source 1..21: mol_type = other DNA
ccccaggacaaggtggggacg

SEQ ID NO: 11886 - DNA, 21 bp, synthetic construct
  misc_feature 1..21: note = Synthetic
  source 1..21: mol_type = other DNA
ccccaggcaaaggaagacgag

SEQ ID NO: 11887 - DNA, 21 bp, synthetic construct
  misc_feature 1..21: note = Synthetic
  source 1..21: mol_type = other DNA
ccccaggcagccgggaggtgt

SEQ ID NO: 11888 - DNA, 21 bp, synthetic construct
  misc_feature 1..21: note = Synthetic
  source 1..21: mol_type = other DNA
ccccagggccccatgctcgca

SEQ ID NO: 11889 - DNA, 21 bp, synthetic construct
  misc_feature 1..21: note = Synthetic
  source 1..21: mol_type = other DNA
ccccagtcagtccagtacatg

SEQ ID NO: 11890 - DNA, 21 bp, synthetic construct
  misc_feature 1..21: note = Synthetic
  source 1..21: mol_type = other DNA
ccccatgctcgcagcctctgc

SEQ ID NO: 11891 - DNA, 21 bp, synthetic construct
  misc_feature 1..21: note = Synthetic
  source 1..21: mol_type = other DNA
cccccacagctgaagtccccg

SEQ ID NO: 11892 - DNA, 21 bp, synthetic construct
  misc_feature 1..21: note = Synthetic
  source 1..21: mol_type = other DNA
cccccaggacaaggtggggac

SEQ ID NO: 11893 - DNA, 21 bp, synthetic construct
  misc_feature 1..21: note = Synthetic
  source 1..21: mol_type = other DNA
cccccaggcaaaggaagacga

SEQ ID NO: 11894 - DNA, 21 bp, synthetic construct
  misc_feature 1..21: note = Synthetic
  source 1..21: mol_type = other DNA
ccccccaggacaaggtgggga

SEQ ID NO: 11895 - DNA, 21 bp, synthetic construct
  misc_feature 1..21: note = Synthetic
  source 1..21: mol_type = other DNA
ccccccgggcctgtttctctt

SEQ ID NO: 11896 - DNA, 21 bp, synthetic construct
  misc_feature 1..21: note = Synthetic
  source 1..21: mol_type = other DNA
cccccgagaccagagacccag

SEQ ID NO: 11897 - DNA, 21 bp, synthetic construct
  misc_feature 1..21: note = Synthetic
  source 1..21: mol_type = other DNA
cccccgggcctgtttctctta

SEQ ID NO: 11898 - DNA, 21 bp, synthetic construct
  misc_feature 1..21: note = Synthetic
  source 1..21: mol_type = other DNA
cccccgttgacatcgatgctt

SEQ ID NO: 11899 - DNA, 21 bp, synthetic construct
  misc_feature 1..21: note = Synthetic
  source 1..21: mol_type = other DNA
ccccctacacagggccccgag

SEQ ID NO: 11900 - DNA, 21 bp, synthetic construct
  misc_feature 1..21: note = Synthetic
  source 1..21: mol_type = other DNA
ccccctttcttgatcttggcg

SEQ ID NO: 11901 - DNA, 21 bp, synthetic construct
  misc_feature 1..21: note = Synthetic
  source 1..21: mol_type = other DNA
ccccgagaatagtcactgaac

SEQ ID NO: 11902 - DNA, 21 bp, synthetic construct
  misc_feature 1..21: note = Synthetic
  source 1..21: mol_type = other DNA
ccccgagaccagagacccagc

SEQ ID NO: 11903 - DNA, 21 bp, synthetic construct
  misc_feature 1..21: note = Synthetic
  source 1..21: mol_type = other DNA
ccccgccgcggcgaggagcaa

SEQ ID NO: 11904 - DNA, 21 bp, synthetic construct
  misc_feature 1..21: note = Synthetic
  source 1..21: mol_type = other DNA
ccccggatttgcaggtgacag

SEQ ID NO: 11905 - DNA, 21 bp, synthetic construct
  misc_feature 1..21: note = Synthetic
  source 1..21: mol_type = other DNA
ccccggcattcattgacacgg

SEQ ID NO: 11906 - DNA, 21 bp, synthetic construct
  misc_feature 1..21: note = Synthetic
  source 1..21: mol_type = other DNA
ccccgggcctgtttctcttat

SEQ ID NO: 11907 - DNA, 21 bp, synthetic construct
  misc_feature 1..21: note = Synthetic
  source 1..21: mol_type = other DNA
ccccgttgacatcgatgcttg

SEQ ID NO: 11908 - DNA, 21 bp, synthetic construct
  misc_feature 1..21: note = Synthetic
  source 1..21: mol_type = other DNA
cccctacacagggccccgaga

SEQ ID NO: 11909 - DNA, 21 bp, synthetic construct
  misc_feature 1..21: note = Synthetic
  source 1..21: mol_type = other DNA
cccctacagcgctgcggccac

SEQ ID NO: 11910 - DNA, 21 bp, synthetic construct
  misc_feature 1..21: note = Synthetic
  source 1..21: mol_type = other DNA
cccctcccctttcatcttcca

SEQ ID NO: 11911 - DNA, 21 bp, synthetic construct
  misc_feature 1..21: note = Synthetic
  source 1..21: mol_type = other DNA
cccctctctgtccccggcatt

SEQ ID NO: 11912 - DNA, 21 bp, synthetic construct
  misc_feature 1..21: note = Synthetic
  source 1..21: mol_type = other DNA
cccctctgtgaacttgatcgg

SEQ ID NO: 11913 - DNA, 21 bp, synthetic construct
  misc_feature 1..21: note = Synthetic
  source 1..21: mol_type = other DNA
ccccttggaacacgtaaagac

SEQ ID NO: 11914 - DNA, 21 bp, synthetic construct
  misc_feature 1..21: note = Synthetic
  source 1..21: mol_type = other DNA
cccctttcatcttccatgttt

SEQ ID NO: 11915 - DNA, 21 bp, synthetic construct
  misc_feature 1..21: note = Synthetic
  source 1..21: mol_type = other DNA
cccctttcttgatcttggcgg

SEQ ID NO: 11916 - DNA, 21 bp, synthetic construct
  misc_feature 1..21: note = Synthetic
  source 1..21: mol_type = other DNA
cccgacccggatcacgacctg

SEQ ID NO: 11917 - DNA, 21 bp, synthetic construct
  misc_feature 1..21: note = Synthetic
  source 1..21: mol_type = other DNA
cccgagaatagtcactgaaca

SEQ ID NO: 11918 - DNA, 21 bp, synthetic construct
  misc_feature 1..21: note = Synthetic
  source 1..21: mol_type = other DNA
cccgagaccagagacccagct

SEQ ID NO: 11919 - DNA, 21 bp, synthetic construct
  misc_feature 1..21: note = Synthetic
  source 1..21: mol_type = other DNA
cccgagtagctgggactacag

SEQ ID NO: 11920 - DNA, 21 bp, synthetic construct
  misc_feature 1..21: note = Synthetic
  source 1..21: mol_type = other DNA
cccgcactctttgatgggttc

SEQ ID NO: 11921 - DNA, 21 bp, synthetic construct
  misc_feature 1..21: note = Synthetic
  source 1..21: mol_type = other DNA
cccgccaccacgcccggctaa

SEQ ID NO: 11922 - DNA, 21 bp, synthetic construct
  misc_feature 1..21: note = Synthetic
  source 1..21: mol_type = other DNA
cccgccgcggcgaggagcaag

SEQ ID NO: 11923 - DNA, 21 bp, synthetic construct
  misc_feature 1..21: note = Synthetic
  source 1..21: mol_type = other DNA
cccgcctcggcctcccaaagt

SEQ ID NO: 11924 - DNA, 21 bp, synthetic construct
  misc_feature 1..21: note = Synthetic
  source 1..21: mol_type = other DNA
cccggatcacgacctgctgtg

SEQ ID NO: 11925 - DNA, 21 bp, synthetic construct
  misc_feature 1..21: note = Synthetic
  source 1..21: mol_type = other DNA
cccggatttgcaggtgacaga

SEQ ID NO: 11926 - DNA, 21 bp, synthetic construct
  misc_feature 1..21: note = Synthetic
  source 1..21: mol_type = other DNA
cccggcagtctctagccatgt

SEQ ID NO: 11927 - DNA, 21 bp, synthetic construct
  misc_feature 1..21: note = Synthetic
  source 1..21: mol_type = other DNA
cccggcattcattgacacggg

SEQ ID NO: 11928 - DNA, 21 bp, synthetic construct
  misc_feature 1..21: note = Synthetic
  source 1..21: mol_type = other DNA
cccggcctcaccgtgcatgtt

SEQ ID NO: 11929 - DNA, 21 bp, synthetic construct
  misc_feature 1..21: note = Synthetic
  source 1..21: mol_type = other DNA
cccggctaattttttgtattt

SEQ ID NO: 11930 - DNA, 21 bp, synthetic construct
  misc_feature 1..21: note = Synthetic
  source 1..21: mol_type = other DNA
cccgggacttgtcgtcgcctt

SEQ ID NO: 11931 - DNA, 21 bp, synthetic construct
  misc_feature 1..21: note = Synthetic
  source 1..21: mol_type = other DNA
cccgggcctgtttctcttatc

SEQ ID NO: 11932 - DNA, 21 bp, synthetic construct
  misc_feature 1..21: note = Synthetic
  source 1..21: mol_type = other DNA
cccgggttcacaccattctcc

SEQ ID NO: 11933 - DNA, 21 bp, synthetic construct
  misc_feature 1..21: note = Synthetic
  source 1..21: mol_type = other DNA
cccggtcaacctgcccctctc

SEQ ID NO: 11934 - DNA, 21 bp, synthetic construct
  misc_feature 1..21: note = Synthetic
  source 1..21: mol_type = other DNA
cccggtcacactgccggctgc

SEQ ID NO: 11935 - DNA, 21 bp, synthetic construct
  misc_feature 1..21: note = Synthetic
  source 1..21: mol_type = other DNA
cccggtctgagtcacagacga

SEQ ID NO: 11936 - DNA, 21 bp, synthetic construct
  misc_feature 1..21: note = Synthetic
  source 1..21: mol_type = other DNA
cccgtcaaacgatccagactg

SEQ ID NO: 11937 - DNA, 21 bp, synthetic construct
  misc_feature 1..21: note = Synthetic
  source 1..21: mol_type = other DNA
cccgtcgggggcctggatgtc

SEQ ID NO: 11938 - DNA, 21 bp, synthetic construct
  misc_feature 1..21: note = Synthetic
  source 1..21: mol_type = other DNA
cccgtcttggcactggaactc

SEQ ID NO: 11939 - DNA, 21 bp, synthetic construct
  misc_feature 1..21: note = Synthetic
  source 1..21: mol_type = other DNA
cccgttgacatcgatgcttga

SEQ ID NO: 11940 - DNA, 21 bp, synthetic construct
  misc_feature 1..21: note = Synthetic
  source 1..21: mol_type = other DNA
cccgttggtgccatctgctgt

SEQ ID NO: 11941 - DNA, 21 bp, synthetic construct
  misc_feature 1..21: note = Synthetic
  source 1..21: mol_type = other DNA
ccctacacagggccccgagaa

SEQ ID NO: 11942 - DNA, 21 bp, synthetic construct
  misc_feature 1..21: note = Synthetic
  source 1..21: mol_type = other DNA
ccctacagcgctgcggccact

SEQ ID NO: 11943 - DNA, 21 bp, synthetic construct
  misc_feature 1..21: note = Synthetic
  source 1..21: mol_type = other DNA
ccctcacgctactgggcttct

SEQ ID NO: 11944 - DNA, 21 bp, synthetic construct
  misc_feature 1..21: note = Synthetic
  source 1..21: mol_type = other DNA
ccctccaggttcacgcagagc

SEQ ID NO: 11945 - DNA, 21 bp, synthetic construct
  misc_feature 1..21: note = Synthetic
  source 1..21: mol_type = other DNA
ccctcccctttcatcttccat

SEQ ID NO: 11946 - DNA, 21 bp, synthetic construct
  misc_feature 1..21: note = Synthetic
  source 1..21: mol_type = other DNA
ccctcgcagagtgtcacatta

SEQ ID NO: 11947 - DNA, 21 bp, synthetic construct
  misc_feature 1..21: note = Synthetic
  source 1..21: mol_type = other DNA
ccctcgcagagtgtcagacag

SEQ ID NO: 11948 - DNA, 21 bp, synthetic construct
  misc_feature 1..21: note = Synthetic
  source 1..21: mol_type = other DNA
ccctctctgtccccggcattc

SEQ ID NO: 11949 - DNA, 21 bp, synthetic construct
  misc_feature 1..21: note = Synthetic
  source 1..21: mol_type = other DNA
ccctctgtgaacttgatcggg

SEQ ID NO: 11950 - DNA, 21 bp, synthetic construct
  misc_feature 1..21: note = Synthetic
  source 1..21: mol_type = other DNA
ccctgaataacgttttcctct

SEQ ID NO: 11951 - DNA, 21 bp, synthetic construct
  misc_feature 1..21: note = Synthetic
  source 1..21: mol_type = other DNA
ccctgcactgggggggacaca

SEQ ID NO: 11952 - DNA, 21 bp, synthetic construct
  misc_feature 1..21: note = Synthetic
  source 1..21: mol_type = other DNA
ccctggccagcagcatgccgt

SEQ ID NO: 11953 - DNA, 21 bp, synthetic construct
  misc_feature 1..21: note = Synthetic
  source 1..21: mol_type = other DNA
ccctggcctgggatcccatcc

SEQ ID NO: 11954 - DNA, 21 bp, synthetic construct
  misc_feature 1..21: note = Synthetic
  source 1..21: mol_type = other DNA
ccctggcttcccgcgattgca

SEQ ID NO: 11955 - DNA, 21 bp, synthetic construct
  misc_feature 1..21: note = Synthetic
  source 1..21: mol_type = other DNA
ccctggggacaattgccaatc

SEQ ID NO: 11956 - DNA, 21 bp, synthetic construct
  misc_feature 1..21: note = Synthetic
  source 1..21: mol_type = other DNA
cccttggaacacgtaaagacc

SEQ ID NO: 11957 - DNA, 21 bp, synthetic construct
  misc_feature 1..21: note = Synthetic
  source 1..21: mol_type = other DNA
cccttggcttggagccgttct

SEQ ID NO: 11958 - DNA, 21 bp, synthetic construct
  misc_feature 1..21: note = Synthetic
  source 1..21: mol_type = other DNA
cccttggtatccgcaacagag

SEQ ID NO: 11959 - DNA, 21 bp, synthetic construct
  misc_feature 1..21: note = Synthetic
  source 1..21: mol_type = other DNA
cccttgtgacatcttcacgcg

SEQ ID NO: 11960 - DNA, 21 bp, synthetic construct
  misc_feature 1..21: note = Synthetic
  source 1..21: mol_type = other DNA
ccctttcatcttccatgtttg

SEQ ID NO: 11961 - DNA, 21 bp, synthetic construct
  misc_feature 1..21: note = Synthetic
  source 1..21: mol_type = other DNA
ccctttcctggcttaaggaag

SEQ ID NO: 11962 - DNA, 21 bp, synthetic construct
  misc_feature 1..21: note = Synthetic
  source 1..21: mol_type = other DNA
ccctttcttgatcttggcggg

SEQ ID NO: 11963 - DNA, 21 bp, synthetic construct
  misc_feature 1..21: note = Synthetic
  source 1..21: mol_type = other DNA
ccgaaaccagaaaggcttatc

SEQ ID NO: 11964 - DNA, 21 bp, synthetic construct
  misc_feature 1..21: note = Synthetic
  source 1..21: mol_type = other DNA
ccgaagcctgttctgcctccc

SEQ ID NO: 11965 - DNA, 21 bp, synthetic construct
  misc_feature 1..21: note = Synthetic
  source 1..21: mol_type = other DNA
ccgacccggatcacgacctgc

SEQ ID NO: 11966 - DNA, 21 bp, synthetic construct
  misc_feature 1..21: note = Synthetic
  source 1..21: mol_type = other DNA
ccgacgccatgaatccctttc

SEQ ID NO: 11967 - DNA, 21 bp, synthetic construct
  misc_feature 1..21: note = Synthetic
  source 1..21: mol_type = other DNA
ccgagaatagtcactgaacaa

SEQ ID NO: 11968 - DNA, 21 bp, synthetic construct
  misc_feature 1..21: note = Synthetic
  source 1..21: mol_type = other DNA
ccgagaccagagacccagctc

SEQ ID NO: 11969 - DNA, 21 bp, synthetic construct
  misc_feature 1..21: note = Synthetic
  source 1..21: mol_type = other DNA
ccgagagatgcacttcccatc

SEQ ID NO: 11970 - DNA, 21 bp, synthetic construct
  misc_feature 1..21: note = Synthetic
  source 1..21: mol_type = other DNA
ccgagcaggggctactgtccc

SEQ ID NO: 11971 - DNA, 21 bp, synthetic construct
  misc_feature 1..21: note = Synthetic
  source 1..21: mol_type = other DNA
ccgagccatcttcgcagtcgg

SEQ ID NO: 11972 - DNA, 21 bp, synthetic construct
  misc_feature 1..21: note = Synthetic
  source 1..21: mol_type = other DNA
ccgaggccttgagggtggccg

SEQ ID NO: 11973 - DNA, 21 bp, synthetic construct
  misc_feature 1..21: note = Synthetic
  source 1..21: mol_type = other DNA
ccgagtagctgggactacagg

SEQ ID NO: 11974 - DNA, 21 bp, synthetic construct
  misc_feature 1..21: note = Synthetic
  source 1..21: mol_type = other DNA
ccgatcttaaggtcattgcag

SEQ ID NO: 11975 - DNA, 21 bp, synthetic construct
  misc_feature 1..21: note = Synthetic
  source 1..21: mol_type = other DNA
ccgcaacagagacagtgccca

SEQ ID NO: 11976 - DNA, 21 bp, synthetic construct
  misc_feature 1..21: note = Synthetic
  source 1..21: mol_type = other DNA
ccgcactctttgatgggttca

SEQ ID NO: 11977 - DNA, 21 bp, synthetic construct
  misc_feature 1..21: note = Synthetic
  source 1..21: mol_type = other DNA
ccgccaccacgcccggctaat

SEQ ID NO: 11978 - DNA, 21 bp, synthetic construct
  misc_feature 1..21: note = Synthetic
  source 1..21: mol_type = other DNA
ccgccagttcttccatagaag

SEQ ID NO: 11979 - DNA, 21 bp, synthetic construct
  misc_feature 1..21: note = Synthetic
  source 1..21: mol_type = other DNA
ccgccattgctcagggtggtc

SEQ ID NO: 11980 - DNA, 21 bp, synthetic construct
  misc_feature 1..21: note = Synthetic
  source 1..21: mol_type = other DNA
ccgccgcggcgaggagcaagg

SEQ ID NO: 11981 - DNA, 21 bp, synthetic construct
  misc_feature 1..21: note = Synthetic
  source 1..21: mol_type = other DNA
ccgccgttgttgtccaagcat

SEQ ID NO: 11982 - DNA, 21 bp, synthetic construct
  misc_feature 1..21: note = Synthetic
  source 1..21: mol_type = other DNA
ccgcctcggcctcccaaagtg

SEQ ID NO: 11983 - DNA, 21 bp, synthetic construct
  misc_feature 1..21: note = Synthetic
  source 1..21: mol_type = other DNA
ccgcggaggaacgccaggcct

SEQ ID NO: 11984 - DNA, 21 bp, synthetic construct
  misc_feature 1..21: note = Synthetic
  source 1..21: mol_type = other DNA
ccgcggcgaggagcaaggcga

SEQ ID NO: 11985 - DNA, 21 bp, synthetic construct
  misc_feature 1..21: note = Synthetic
  source 1..21: mol_type = other DNA
ccgctgtgacacttgaacttg

SEQ ID NO: 11986 - DNA, 21 bp, synthetic construct
  misc_feature 1..21: note = Synthetic
  source 1..21: mol_type = other DNA
ccgcttcccgggttcacacca

SEQ ID NO: 11987 - DNA, 21 bp, synthetic construct
  misc_feature 1..21: note = Synthetic
  source 1..21: mol_type = other DNA
ccggacatcagtgcaacagta

SEQ ID NO: 11988 - DNA, 21 bp, synthetic construct
  misc_feature 1..21: note = Synthetic
  source 1..21: mol_type = other DNA
ccggatcacgacctgctgtgt

SEQ ID NO: 11989 - DNA, 21 bp, synthetic construct
  misc_feature 1..21: note = Synthetic
  source 1..21: mol_type = other DNA
ccggatttgcaggtgacagac

SEQ ID NO: 11990 - DNA, 21 bp, synthetic construct
  misc_feature 1..21: note = Synthetic
  source 1..21: mol_type = other DNA
ccggcagtctctagccatgtt

SEQ ID NO: 11991 - DNA, 21 bp, synthetic construct
  misc_feature 1..21: note = Synthetic
  source 1..21: mol_type = other DNA
ccggcattcattgacacgggc

SEQ ID NO: 11992 - DNA, 21 bp, synthetic construct
  misc_feature 1..21: note = Synthetic
  source 1..21: mol_type = other DNA
ccggcctcaccgtgcatgttt

SEQ ID NO: 11993 - DNA, 21 bp, synthetic construct
  misc_feature 1..21: note = Synthetic
  source 1..21: mol_type = other DNA
ccggcgaggtctcaggaaggg

SEQ ID NO: 11994 - DNA, 21 bp, synthetic construct
  misc_feature 1..21: note = Synthetic
  source 1..21: mol_type = other DNA
ccggctaattttttgtatttt

SEQ ID NO: 11995 - DNA, 21 bp, synthetic construct
  misc_feature 1..21: note = Synthetic
  source 1..21: mol_type = other DNA
ccggctgccatggatgcagtt

SEQ ID NO: 11996 - DNA, 21 bp, synthetic construct
  misc_feature 1..21: note = Synthetic
  source 1..21: mol_type = other DNA
ccgggacttgtcgtcgccttt

SEQ ID NO: 11997 - DNA, 21 bp, synthetic construct
  misc_feature 1..21: note = Synthetic
  source 1..21: mol_type = other DNA
ccgggaggtgtcgggaacagg

SEQ ID NO: 11998 - DNA, 21 bp, synthetic construct
  misc_feature 1..21: note = Synthetic
  source 1..21: mol_type = other DNA
ccgggcaggaggcctcgtctg

SEQ ID NO: 11999 - DNA, 21 bp, synthetic construct
  misc_feature 1..21: note = Synthetic
  source 1..21: mol_type = other DNA
ccgggcaggcgcaggtaaact

SEQ ID NO: 12000 - DNA, 21 bp, synthetic construct
  misc_feature 1..21: note = Synthetic
  source 1..21: mol_type = other DNA
ccgggcctgtttctcttatcc

SEQ ID NO: 12001 - DNA, 21 bp, synthetic construct
  misc_feature 1..21: note = Synthetic
  source 1..21: mol_type = other DNA
ccggggacccgggacttgtcg

SEQ ID NO: 12002 - DNA, 21 bp, synthetic construct
  misc_feature 1..21: note = Synthetic
  source 1..21: mol_type = other DNA
ccggggacttcgccaggaggg

SEQ ID NO: 12003 - DNA, 21 bp, synthetic construct
  misc_feature 1..21: note = Synthetic
  source 1..21: mol_type = other DNA
ccgggggcccctctgtgaact

SEQ ID NO: 12004 - DNA, 21 bp, synthetic construct
  misc_feature 1..21: note = Synthetic
  source 1..21: mol_type = other DNA
ccgggtgtctcaggcacttaa

SEQ ID NO: 12005 - DNA, 21 bp, synthetic construct
  misc_feature 1..21: note = Synthetic
  source 1..21: mol_type = other DNA
ccgggttcacaccattctcct

SEQ ID NO: 12006 - DNA, 21 bp, synthetic construct
  misc_feature 1..21: note = Synthetic
  source 1..21: mol_type = other DNA
ccggtcaacctgcccctctct

SEQ ID NO: 12007 - DNA, 21 bp, synthetic construct
  misc_feature 1..21: note = Synthetic
  source 1..21: mol_type = other DNA
ccggtcacactgccggctgcc

SEQ ID NO: 12008 - DNA, 21 bp, synthetic construct
  misc_feature 1..21: note = Synthetic
  source 1..21: mol_type = other DNA
ccggtccagcgtcatcttcct

SEQ ID NO: 12009 - DNA, 21 bp, synthetic construct
  misc_feature 1..21: note = Synthetic
  source 1..21: mol_type = other DNA
ccggtctgagtcacagacgaa

SEQ ID NO: 12010 - DNA, 21 bp, synthetic construct
  misc_feature 1..21: note = Synthetic
  source 1..21: mol_type = other DNA
ccggttgcccccgttgacatc

SEQ ID NO: 12011 - DNA, 21 bp, synthetic construct
  misc_feature 1..21: note = Synthetic
  source 1..21: mol_type = other DNA
ccggttggtgaagaagaggta

SEQ ID NO: 12012 - DNA, 21 bp, synthetic construct
  misc_feature 1..21: note = Synthetic
  source 1..21: mol_type = other DNA
ccgtacccagctgatttttaa

SEQ ID NO: 12013 - DNA, 21 bp, synthetic construct
  misc_feature 1..21: note = Synthetic
  source 1..21: mol_type = other DNA
ccgtcaaacgatccagactgg

SEQ ID NO: 12014 - DNA, 21 bp, synthetic construct
  misc_feature 1..21: note = Synthetic
  source 1..21: mol_type = other DNA
ccgtccaagcagtcccggtct

SEQ ID NO: 12015 - DNA, 21 bp, synthetic construct
  misc_feature 1..21: note = Synthetic
  source 1..21: mol_type = other DNA
ccgtccgggcaggcgcaggta

SEQ ID NO: 12016 - DNA, 21 bp, synthetic construct
  misc_feature 1..21: note = Synthetic
  source 1..21: mol_type = other DNA
ccgtcctggttgtggcaaatg

SEQ ID NO: 12017 - DNA, 21 bp, synthetic construct
  misc_feature 1..21: note = Synthetic
  source 1..21: mol_type = other DNA
ccgtcggggcacaggcactcg

SEQ ID NO: 12018 - DNA, 21 bp, synthetic construct
  misc_feature 1..21: note = Synthetic
  source 1..21: mol_type = other DNA
ccgtcgggggcctggatgtct

SEQ ID NO: 12019 - DNA, 21 bp, synthetic construct
  misc_feature 1..21: note = Synthetic
  source 1..21: mol_type = other DNA
ccgtcttggcactggaactcg

SEQ ID NO: 12020 - DNA, 21 bp, synthetic construct
  misc_feature 1..21: note = Synthetic
  source 1..21: mol_type = other DNA
ccgtgcatgttttaaacacat

SEQ ID NO: 12021 - DNA, 21 bp, synthetic construct
  misc_feature 1..21: note = Synthetic
  source 1..21: mol_type = other DNA
ccgtggcgatggggaggacaa

SEQ ID NO: 12022 - DNA, 21 bp, synthetic construct
  misc_feature 1..21: note = Synthetic
  source 1..21: mol_type = other DNA
ccgtgggctctgtcaagctgg

SEQ ID NO: 12023 - DNA, 21 bp, synthetic construct
  misc_feature 1..21: note = Synthetic
  source 1..21: mol_type = other DNA
ccgtggtgagcccaggggtgg

SEQ ID NO: 12024 - DNA, 21 bp, synthetic construct
  misc_feature 1..21: note = Synthetic
  source 1..21: mol_type = other DNA
ccgtgtccagagcgaccacgt

SEQ ID NO: 12025 - DNA, 21 bp, synthetic construct
  misc_feature 1..21: note = Synthetic
  source 1..21: mol_type = other DNA
ccgttctccctgaataacgtt

SEQ ID NO: 12026 - DNA, 21 bp, synthetic construct
  misc_feature 1..21: note = Synthetic
  source 1..21: mol_type = other DNA
ccgttgacatcgatgcttgag

SEQ ID NO: 12027 - DNA, 21 bp, synthetic construct
  misc_feature 1..21: note = Synthetic
  source 1..21: mol_type = other DNA
ccgttggtgccatctgctgtt

SEQ ID NO: 12028 - DNA, 21 bp, synthetic construct
  misc_feature 1..21: note = Synthetic
  source 1..21: mol_type = other DNA
ccgttgtcgcagtccacttgg

SEQ ID NO: 12029 - DNA, 21 bp, synthetic construct
  misc_feature 1..21: note = Synthetic
  source 1..21: mol_type = other DNA
ccgttgttgtccaagcattcg

SEQ ID NO: 12030 - DNA, 21 bp, synthetic construct
  misc_feature 1..21: note = Synthetic
  source 1..21: mol_type = other DNA
cctacacagggccccgagaat

SEQ ID NO: 12031 - DNA, 21 bp, synthetic construct
  misc_feature 1..21: note = Synthetic
  source 1..21: mol_type = other DNA
cctacagcgctgcggccactc

SEQ ID NO: 12032 - DNA, 21 bp, synthetic construct
  misc_feature 1..21: note = Synthetic
  source 1..21: mol_type = other DNA
cctagctggaaaccctggctt

SEQ ID NO: 12033 - DNA, 21 bp, synthetic construct
  misc_feature 1..21: note = Synthetic
  source 1..21: mol_type = other DNA
cctcaaagacggccaaggaga

SEQ ID NO: 12034 - DNA, 21 bp, synthetic construct
  misc_feature 1..21: note = Synthetic
  source 1..21: mol_type = other DNA
cctcaaatgcctgagctcaaa

SEQ ID NO: 12035 - DNA, 21 bp, synthetic construct
  misc_feature 1..21: note = Synthetic
  source 1..21: mol_type = other DNA
cctcacactggcacttgtagc

SEQ ID NO: 12036 - DNA, 21 bp, synthetic construct
  misc_feature 1..21: note = Synthetic
  source 1..21: mol_type = other DNA
cctcaccgtgcatgttttaaa

SEQ ID NO: 12037 - DNA, 21 bp, synthetic construct
  misc_feature 1..21: note = Synthetic
  source 1..21: mol_type = other DNA
cctcacgctactgggcttctt

SEQ ID NO: 12038 - DNA, 21 bp, synthetic construct
  misc_feature 1..21: note = Synthetic
  source 1..21: mol_type = other DNA
cctcacggccaaggtaaccgg

SEQ ID NO: 12039 - DNA, 21 bp, synthetic construct
  misc_feature 1..21: note = Synthetic
  source 1..21: mol_type = other DNA
cctcagcctcccaagtagctg

SEQ ID NO: 12040 - DNA, 21 bp, synthetic construct
  misc_feature 1..21: note = Synthetic
  source 1..21: mol_type = other DNA
cctcagcctcccgagtagctg

SEQ ID NO: 12041 - DNA, 21 bp, synthetic construct
  misc_feature 1..21: note = Synthetic
  source 1..21: mol_type = other DNA
cctcagcctcgccatgcctgg

SEQ ID NO: 12042 - DNA, 21 bp, synthetic construct
  misc_feature 1..21: note = Synthetic
  source 1..21: mol_type = other DNA
cctcagcctctcttggctggg

SEQ ID NO: 12043 - DNA, 21 bp, synthetic construct
  misc_feature 1..21: note = Synthetic
  source 1..21: mol_type = other DNA
cctcagcctctgtgaggcagc

SEQ ID NO: 12044 - DNA, 21 bp, synthetic construct
  misc_feature 1..21: note = Synthetic
  source 1..21: mol_type = other DNA
cctcaggttggggatgaggct

SEQ ID NO: 12045 - DNA, 21 bp, synthetic construct
  misc_feature 1..21: note = Synthetic
  source 1..21: mol_type = other DNA
cctcatcctctgtggtcttct

SEQ ID NO: 12046 - DNA, 21 bp, synthetic construct
  misc_feature 1..21: note = Synthetic
  source 1..21: mol_type = other DNA
cctcatgatccacccgcctcg

SEQ ID NO: 12047 - DNA, 21 bp, synthetic construct
  misc_feature 1..21: note = Synthetic
  source 1..21: mol_type = other DNA
cctcatgtccctggccagcag

SEQ ID NO: 12048 - DNA, 21 bp, synthetic construct
  misc_feature 1..21: note = Synthetic
  source 1..21: mol_type = other DNA
cctccaagatggtcttccggt

SEQ ID NO: 12049 - DNA, 21 bp, synthetic construct
  misc_feature 1..21: note = Synthetic
  source 1..21: mol_type = other DNA
cctccacctcctgggctcagg

SEQ ID NO: 12050 - DNA, 21 bp, synthetic construct
  misc_feature 1..21: note = Synthetic
  source 1..21: mol_type = other DNA
cctccagaactgaggaatgca

SEQ ID NO: 12051 - DNA, 21 bp, synthetic construct
  misc_feature 1..21: note = Synthetic
  source 1..21: mol_type = other DNA
cctccagactgaccatcgagg

SEQ ID NO: 12052 - DNA, 21 bp, synthetic construct
  misc_feature 1..21: note = Synthetic
  source 1..21: mol_type = other DNA
cctccagactgaccatctgtc

SEQ ID NO: 12053 - DNA, 21 bp, synthetic construct
  misc_feature 1..21: note = Synthetic
  source 1..21: mol_type = other DNA
cctccaggttcacgcagagct

SEQ ID NO: 12054 - DNA, 21 bp, synthetic construct
  misc_feature 1..21: note = Synthetic
  source 1..21: mol_type = other DNA
cctcccaaagtgctgggatta

SEQ ID NO: 12055 - DNA, 21 bp, synthetic construct
  misc_feature 1..21: note = Synthetic
  source 1..21: mol_type = other DNA
cctcccaagtagctgggatca

SEQ ID NO: 12056 - DNA, 21 bp, synthetic construct
  misc_feature 1..21: note = Synthetic
  source 1..21: mol_type = other DNA
cctcccacctcagcctcgcca

SEQ ID NO: 12057 - DNA, 21 bp, synthetic construct
  misc_feature 1..21: note = Synthetic
  source 1..21: mol_type = other DNA
cctcccagatgaataaatata

SEQ ID NO: 12058 - DNA, 21 bp, synthetic construct
  misc_feature 1..21: note = Synthetic
  source 1..21: mol_type = other DNA
cctcccctttcatcttccatg

SEQ ID NO: 12059 - DNA, 21 bp, synthetic construct
  misc_feature 1..21: note = Synthetic
  source 1..21: mol_type = other DNA
cctcccgagtagctgggacta

SEQ ID NO: 12060 - DNA, 21 bp, synthetic construct
  misc_feature 1..21: note = Synthetic
  source 1..21: mol_type = other DNA
cctccgtgtccagagcgacca

SEQ ID NO: 12061 - DNA, 21 bp, synthetic construct
  misc_feature 1..21: note = Synthetic
  source 1..21: mol_type = other DNA
cctcctgcctcagcctcccaa

SEQ ID NO: 12062 - DNA, 21 bp, synthetic construct
  misc_feature 1..21: note = Synthetic
  source 1..21: mol_type = other DNA
cctcctgggctcaggcgatcc

SEQ ID NO: 12063 - DNA, 21 bp, synthetic construct
  misc_feature 1..21: note = Synthetic
  source 1..21: mol_type = other DNA
cctcgaaagacactgggtggg

SEQ ID NO: 12064 - DNA, 21 bp, synthetic construct
  misc_feature 1..21: note = Synthetic
  source 1..21: mol_type = other DNA
cctcgcagagtgtcacattaa

SEQ ID NO: 12065 - DNA, 21 bp, synthetic construct
  misc_feature 1..21: note = Synthetic
  source 1..21: mol_type = other DNA
cctcgcagagtgtcagacagc

SEQ ID NO: 12066 - DNA, 21 bp, synthetic construct
  misc_feature 1..21: note = Synthetic
  source 1..21: mol_type = other DNA
cctcgccatgcctggccagag

SEQ ID NO: 12067 - DNA, 21 bp, synthetic construct
  misc_feature 1..21: note = Synthetic
  source 1..21: mol_type = other DNA
cctcggcctcccaaagtgctg

SEQ ID NO: 12068 - DNA, 21 bp, synthetic construct
  misc_feature 1..21: note = Synthetic
  source 1..21: mol_type = other DNA
cctcgtaaggaaccgaggcct

SEQ ID NO: 12069 - DNA, 21 bp, synthetic construct
  misc_feature 1..21: note = Synthetic
  source 1..21: mol_type = other DNA
cctcgtcagatttgtccttgc

SEQ ID NO: 12070 - DNA, 21 bp, synthetic construct
  misc_feature 1..21: note = Synthetic
  source 1..21: mol_type = other DNA
cctcgtctgagccgtccaagc

SEQ ID NO: 12071 - DNA, 21 bp, synthetic construct
  misc_feature 1..21: note = Synthetic
  source 1..21: mol_type = other DNA
cctcgtgccggttggtgaaga

SEQ ID NO: 12072 - DNA, 21 bp, synthetic construct
  misc_feature 1..21: note = Synthetic
  source 1..21: mol_type = other DNA
cctctcacaccagttcactcc

SEQ ID NO: 12073 - DNA, 21 bp, synthetic construct
  misc_feature 1..21: note = Synthetic
  source 1..21: mol_type = other DNA
cctctctgtccccggcattca

SEQ ID NO: 12074 - DNA, 21 bp, synthetic construct
  misc_feature 1..21: note = Synthetic
  source 1..21: mol_type = other DNA
cctctcttggctgggtgaggt

SEQ ID NO: 12075 - DNA, 21 bp, synthetic construct
  misc_feature 1..21: note = Synthetic
  source 1..21: mol_type = other DNA
cctctgccagcaacgtcgccc

SEQ ID NO: 12076 - DNA, 21 bp, synthetic construct
  misc_feature 1..21: note = Synthetic
  source 1..21: mol_type = other DNA
cctctgccaggcagtgtcccg

SEQ ID NO: 12077 - DNA, 21 bp, synthetic construct
  misc_feature 1..21: note = Synthetic
  source 1..21: mol_type = other DNA
cctctgggaagtggcatcatt

SEQ ID NO: 12078 - DNA, 21 bp, synthetic construct
  misc_feature 1..21: note = Synthetic
  source 1..21: mol_type = other DNA
cctctggggacagtaggtttt

SEQ ID NO: 12079 - DNA, 21 bp, synthetic construct
  misc_feature 1..21: note = Synthetic
  source 1..21: mol_type = other DNA
cctctgtgaacttgatcgggg

SEQ ID NO: 12080 - DNA, 21 bp, synthetic construct
  misc_feature 1..21: note = Synthetic
  source 1..21: mol_type = other DNA
cctctgtgaggcagctcctca

SEQ ID NO: 12081 - DNA, 21 bp, synthetic construct
  misc_feature 1..21: note = Synthetic
  source 1..21: mol_type = other DNA
cctctgtggtcttctgataga

SEQ ID NO: 12082 - DNA, 21 bp, synthetic construct
  misc_feature 1..21: note = Synthetic
  source 1..21: mol_type = other DNA
cctcttcacgcccttggtatc

SEQ ID NO: 12083 - DNA, 21 bp, synthetic construct
  misc_feature 1..21: note = Synthetic
  source 1..21: mol_type = other DNA
cctcttggctgggtgaggttg

SEQ ID NO: 12084 - DNA, 21 bp, synthetic construct
  misc_feature 1..21: note = Synthetic
  source 1..21: mol_type = other DNA
cctcttttcatcctccaagat

SEQ ID NO: 12085 - DNA, 21 bp, synthetic construct
  misc_feature 1..21: note = Synthetic
  source 1..21: mol_type = other DNA
cctgaactcaagtgatccagc

SEQ ID NO: 12086 - DNA, 21 bp, synthetic construct
  misc_feature 1..21: note = Synthetic
  source 1..21: mol_type = other DNA
cctgaagtcccgtcaaacgat

SEQ ID NO: 12087 - DNA, 21 bp, synthetic construct
  misc_feature 1..21: note = Synthetic
  source 1..21: mol_type = other DNA
cctgaataacgttttcctctt

SEQ ID NO: 12088 - DNA, 21 bp, synthetic construct
  misc_feature 1..21: note = Synthetic
  source 1..21: mol_type = other DNA
cctgacactcatcgatatcgc

SEQ ID NO: 12089 - DNA, 21 bp, synthetic construct
  misc_feature 1..21: note = Synthetic
  source 1..21: mol_type = other DNA
cctgacactcatcgatatctt

SEQ ID NO: 12090 - DNA, 21 bp, synthetic construct
  misc_feature 1..21: note = Synthetic
  source 1..21: mol_type = other DNA
cctgacagccacacctgggtg

SEQ ID NO: 12091 - DNA, 21 bp, synthetic construct
  misc_feature 1..21: note = Synthetic
  source 1..21: mol_type = other DNA
cctgacatcccctcccctttc

SEQ ID NO: 12092 - DNA, 21 bp, synthetic construct
  misc_feature 1..21: note = Synthetic
  source 1..21: mol_type = other DNA
cctgacctcatgatccacccg

SEQ ID NO: 12093 - DNA, 21 bp, synthetic construct
  misc_feature 1..21: note = Synthetic
  source 1..21: mol_type = other DNA
cctgacctcgtgccggttggt

SEQ ID NO: 12094 - DNA, 21 bp, synthetic construct
  misc_feature 1..21: note = Synthetic
  source 1..21: mol_type = other DNA
cctgacggtggatgtctcctg

SEQ ID NO: 12095 - DNA, 21 bp, synthetic construct
  misc_feature 1..21: note = Synthetic
  source 1..21: mol_type = other DNA
cctgagctcaaaccatcctcc

SEQ ID NO: 12096 - DNA, 21 bp, synthetic construct
  misc_feature 1..21: note = Synthetic
  source 1..21: mol_type = other DNA
cctgagtttaggggtttggct

SEQ ID NO: 12097 - DNA, 21 bp, synthetic construct
  misc_feature 1..21: note = Synthetic
  source 1..21: mol_type = other DNA
cctgcactgggggggacacag

SEQ ID NO: 12098 - DNA, 21 bp, synthetic construct
  misc_feature 1..21: note = Synthetic
  source 1..21: mol_type = other DNA
cctgcccctctctgtccccgg

SEQ ID NO: 12099 - DNA, 21 bp, synthetic construct
  misc_feature 1..21: note = Synthetic
  source 1..21: mol_type = other DNA
cctgcctcagcctcccaagta

SEQ ID NO: 12100 - DNA, 21 bp, synthetic construct
  misc_feature 1..21: note = Synthetic
  source 1..21: mol_type = other DNA
cctgcctcagcctcccgagta

SEQ ID NO: 12101 - DNA, 21 bp, synthetic construct
  misc_feature 1..21: note = Synthetic
  source 1..21: mol_type = other DNA
cctgctgtgtcctagctggaa

SEQ ID NO: 12102 - DNA, 21 bp, synthetic construct
  misc_feature 1..21: note = Synthetic
  source 1..21: mol_type = other DNA
cctggagagaaatggaggtgt

SEQ ID NO: 12103 - DNA, 21 bp, synthetic construct
  misc_feature 1..21: note = Synthetic
  source 1..21: mol_type = other DNA
cctggatgtctctgctgatga

SEQ ID NO: 12104 - DNA, 21 bp, synthetic construct
  misc_feature 1..21: note = Synthetic
  source 1..21: mol_type = other DNA
cctggcactcagcgctgccat

SEQ ID NO: 12105 - DNA, 21 bp, synthetic construct
  misc_feature 1..21: note = Synthetic
  source 1..21: mol_type = other DNA
cctggccagaggccatgggct

SEQ ID NO: 12106 - DNA, 21 bp, synthetic construct
  misc_feature 1..21: note = Synthetic
  source 1..21: mol_type = other DNA
cctggccagcagcatgccgtc

SEQ ID NO: 12107 - DNA, 21 bp, synthetic construct
  misc_feature 1..21: note = Synthetic
  source 1..21: mol_type = other DNA
cctggcctgggatcccatccc

SEQ ID NO: 12108 - DNA, 21 bp, synthetic construct
  misc_feature 1..21: note = Synthetic
  source 1..21: mol_type = other DNA
cctggctgtctagcaaggctt

SEQ ID NO: 12109 - DNA, 21 bp, synthetic construct
  misc_feature 1..21: note = Synthetic
  source 1..21: mol_type = other DNA
cctggcttaaggaaggtacaa

SEQ ID NO: 12110 - DNA, 21 bp, synthetic construct
  misc_feature 1..21: note = Synthetic
  source 1..21: mol_type = other DNA
cctggcttcccgcgattgcac

SEQ ID NO: 12111 - DNA, 21 bp, synthetic construct
  misc_feature 1..21: note = Synthetic
  source 1..21: mol_type = other DNA
cctgggactcatcagagccat

SEQ ID NO: 12112 - DNA, 21 bp, synthetic construct
  misc_feature 1..21: note = Synthetic
  source 1..21: mol_type = other DNA
cctgggagcacgtcttggggg

SEQ ID NO: 12113 - DNA, 21 bp, synthetic construct
  misc_feature 1..21: note = Synthetic
  source 1..21: mol_type = other DNA
cctgggatcccatcccaacac

SEQ ID NO: 12114 - DNA, 21 bp, synthetic construct
  misc_feature 1..21: note = Synthetic
  source 1..21: mol_type = other DNA
cctgggctcaggcgatcctcc

SEQ ID NO: 12115 - DNA, 21 bp, synthetic construct
  misc_feature 1..21: note = Synthetic
  source 1..21: mol_type = other DNA
cctggggacaattgccaatcc

SEQ ID NO: 12116 - DNA, 21 bp, synthetic construct
  misc_feature 1..21: note = Synthetic
  source 1..21: mol_type = other DNA
cctgggtgcaggccacgtgtc

SEQ ID NO: 12117 - DNA, 21 bp, synthetic construct
  misc_feature 1..21: note = Synthetic
  source 1..21: mol_type = other DNA
cctgggtggccactgcagcct

SEQ ID NO: 12118 - DNA, 21 bp, synthetic construct
  misc_feature 1..21: note = Synthetic
  source 1..21: mol_type = other DNA
cctggtccccccgggcctgtt

SEQ ID NO: 12119 - DNA, 21 bp, synthetic construct
  misc_feature 1..21: note = Synthetic
  source 1..21: mol_type = other DNA
cctggtctccaactcctgaac

SEQ ID NO: 12120 - DNA, 21 bp, synthetic construct
  misc_feature 1..21: note = Synthetic
  source 1..21: mol_type = other DNA
cctggttgtggcaaatgtgga

SEQ ID NO: 12121 - DNA, 21 bp, synthetic construct
  misc_feature 1..21: note = Synthetic
  source 1..21: mol_type = other DNA
cctgtgaggcggttggcactg

SEQ ID NO: 12122 - DNA, 21 bp, synthetic construct
  misc_feature 1..21: note = Synthetic
  source 1..21: mol_type = other DNA
cctgtgtctggccaaattcat

SEQ ID NO: 12123 - DNA, 21 bp, synthetic construct
  misc_feature 1..21: note = Synthetic
  source 1..21: mol_type = other DNA
cctgttctgcctcccagatga

SEQ ID NO: 12124 - DNA, 21 bp, synthetic construct
  misc_feature 1..21: note = Synthetic
  source 1..21: mol_type = other DNA
cctgtttctcttatccttcac

SEQ ID NO: 12125 - DNA, 21 bp, synthetic construct
  misc_feature 1..21: note = Synthetic
  source 1..21: mol_type = other DNA
ccttacggctgtggagctgac

SEQ ID NO: 12126 - DNA, 21 bp, synthetic construct
  misc_feature 1..21: note = Synthetic
  source 1..21: mol_type = other DNA
ccttcacgaggaaaggaagaa

SEQ ID NO: 12127 - DNA, 21 bp, synthetic construct
  misc_feature 1..21: note = Synthetic
  source 1..21: mol_type = other DNA
ccttcctcacactggcacttg

SEQ ID NO: 12128 - DNA, 21 bp, synthetic construct
  misc_feature 1..21: note = Synthetic
  source 1..21: mol_type = other DNA
ccttcgtgtgggggtccagct

SEQ ID NO: 12129 - DNA, 21 bp, synthetic construct
  misc_feature 1..21: note = Synthetic
  source 1..21: mol_type = other DNA
ccttctatacagtggtttaaa

SEQ ID NO: 12130 - DNA, 21 bp, synthetic construct
  misc_feature 1..21: note = Synthetic
  source 1..21: mol_type = other DNA
ccttgagggtggccgggggcc

SEQ ID NO: 12131 - DNA, 21 bp, synthetic construct
  misc_feature 1..21: note = Synthetic
  source 1..21: mol_type = other DNA
ccttgcaggccttcgtgtggg

SEQ ID NO: 12132 - DNA, 21 bp, synthetic construct
  misc_feature 1..21: note = Synthetic
  source 1..21: mol_type = other DNA
ccttgcagtcatattcccggt

SEQ ID NO: 12133 - DNA, 21 bp, synthetic construct
  misc_feature 1..21: note = Synthetic
  source 1..21: mol_type = other DNA
ccttgcagtcggggccaccat

SEQ ID NO: 12134 - DNA, 21 bp, synthetic construct
  misc_feature 1..21: note = Synthetic
  source 1..21: mol_type = other DNA
ccttgctcgtctgagccgttg

SEQ ID NO: 12135 - DNA, 21 bp, synthetic construct
  misc_feature 1..21: note = Synthetic
  source 1..21: mol_type = other DNA
ccttggaacacgtaaagaccc

SEQ ID NO: 12136 - DNA, 21 bp, synthetic construct
  misc_feature 1..21: note = Synthetic
  source 1..21: mol_type = other DNA
ccttggcttggagccgttctc

SEQ ID NO: 12137 - DNA, 21 bp, synthetic construct
  misc_feature 1..21: note = Synthetic
  source 1..21: mol_type = other DNA
ccttggtatccgcaacagaga

SEQ ID NO: 12138 - DNA, 21 bp, synthetic construct
  misc_feature 1..21: note = Synthetic
  source 1..21: mol_type = other DNA
ccttgtgacatcttcacgcgg

SEQ ID NO: 12139 - DNA, 21 bp, synthetic construct
  misc_feature 1..21: note = Synthetic
  source 1..21: mol_type = other DNA
cctttagcctgacggtggatg

SEQ ID NO: 12140 - DNA, 21 bp, synthetic construct
  misc_feature 1..21: note = Synthetic
  source 1..21: mol_type = other DNA
cctttcatcttccatgtttga

SEQ ID NO: 12141 - DNA, 21 bp, synthetic construct
  misc_feature 1..21: note = Synthetic
  source 1..21: mol_type = other DNA
cctttcctggcttaaggaagg

SEQ ID NO: 12142 - DNA, 21 bp, synthetic construct
  misc_feature 1..21: note = Synthetic
  source 1..21: mol_type = other DNA
cctttcttgatcttggcggga

SEQ ID NO: 12143 - DNA, 21 bp, synthetic construct
  misc_feature 1..21: note = Synthetic
  source 1..21: mol_type = other DNA
cctttgtgacaggaaccgcgg

SEQ ID NO: 12144 - DNA, 21 bp, synthetic construct
  misc_feature 1..21: note = Synthetic
  source 1..21: mol_type = other DNA
cgaaaccagaaaggcttatca

SEQ ID NO: 12145 - DNA, 21 bp, synthetic construct
  misc_feature 1..21: note = Synthetic
  source 1..21: mol_type = other DNA
cgaaactcgtcctgggagcac

SEQ ID NO: 12146 - DNA, 21 bp, synthetic construct
  misc_feature 1..21: note = Synthetic
  source 1..21: mol_type = other DNA
cgaaagacactgggtgggtca

SEQ ID NO: 12147 - DNA, 21 bp, synthetic construct
  misc_feature 1..21: note = Synthetic
  source 1..21: mol_type = other DNA
cgaactgccgagagatgcact

SEQ ID NO: 12148 - DNA, 21 bp, synthetic construct
  misc_feature 1..21: note = Synthetic
  source 1..21: mol_type = other DNA
cgaagcctgttctgcctccca

SEQ ID NO: 12149 - DNA, 21 bp, synthetic construct
  misc_feature 1..21: note = Synthetic
  source 1..21: mol_type = other DNA
cgaaggccgagcaggggctac

SEQ ID NO: 12150 - DNA, 21 bp, synthetic construct
  misc_feature 1..21: note = Synthetic
  source 1..21: mol_type = other DNA
cgacaagattggggaagtgaa

SEQ ID NO: 12151 - DNA, 21 bp, synthetic construct
  misc_feature 1..21: note = Synthetic
  source 1..21: mol_type = other DNA
cgacaatggcagttctcgata

SEQ ID NO: 12152 - DNA, 21 bp, synthetic construct
  misc_feature 1..21: note = Synthetic
  source 1..21: mol_type = other DNA
cgacagaaaacagtgcaaaat

SEQ ID NO: 12153 - DNA, 21 bp, synthetic construct
  misc_feature 1..21: note = Synthetic
  source 1..21: mol_type = other DNA
cgacagcctcaaatgcctgag

SEQ ID NO: 12154 - DNA, 21 bp, synthetic construct
  misc_feature 1..21: note = Synthetic
  source 1..21: mol_type = other DNA
cgacaggtggccacagcgcag

SEQ ID NO: 12155 - DNA, 21 bp, synthetic construct
  misc_feature 1..21: note = Synthetic
  source 1..21: mol_type = other DNA
cgacaggtggccacaggacag

SEQ ID NO: 12156 - DNA, 21 bp, synthetic construct
  misc_feature 1..21: note = Synthetic
  source 1..21: mol_type = other DNA
cgaccacgttcctcaggttgg

SEQ ID NO: 12157 - DNA, 21 bp, synthetic construct
  misc_feature 1..21: note = Synthetic
  source 1..21: mol_type = other DNA
cgacccggatcacgacctgct

SEQ ID NO: 12158 - DNA, 21 bp, synthetic construct
  misc_feature 1..21: note = Synthetic
  source 1..21: mol_type = other DNA
cgacctgctgtgtcctagctg

SEQ ID NO: 12159 - DNA, 21 bp, synthetic construct
  misc_feature 1..21: note = Synthetic
  source 1..21: mol_type = other DNA
cgacgccatgaatccctttcc

SEQ ID NO: 12160 - DNA, 21 bp, synthetic construct
  misc_feature 1..21: note = Synthetic
  source 1..21: mol_type = other DNA
cgacggtccagcgcaatttcc

SEQ ID NO: 12161 - DNA, 21 bp, synthetic construct
  misc_feature 1..21: note = Synthetic
  source 1..21: mol_type = other DNA
cgactcgtgtatgtcgcggag

SEQ ID NO: 12162 - DNA, 21 bp, synthetic construct
  misc_feature 1..21: note = Synthetic
  source 1..21: mol_type = other DNA
cgagaatagtcactgaacaaa

SEQ ID NO: 12163 - DNA, 21 bp, synthetic construct
  misc_feature 1..21: note = Synthetic
  source 1..21: mol_type = other DNA
cgagaccagagacccagctcc

SEQ ID NO: 12164 - DNA, 21 bp, synthetic construct
  misc_feature 1..21: note = Synthetic
  source 1..21: mol_type = other DNA
cgagagatgcacttcccatcg

SEQ ID NO: 12165 - DNA, 21 bp, synthetic construct
  misc_feature 1..21: note = Synthetic
  source 1..21: mol_type = other DNA
cgagcaggggctactgtcccc

SEQ ID NO: 12166 - DNA, 21 bp, synthetic construct
  misc_feature 1..21: note = Synthetic
  source 1..21: mol_type = other DNA
cgagccatcttcgcagtcggg

SEQ ID NO: 12167 - DNA, 21 bp, synthetic construct
  misc_feature 1..21: note = Synthetic
  source 1..21: mol_type = other DNA
cgaggaaaggaagaaaccaaa

SEQ ID NO: 12168 - DNA, 21 bp, synthetic construct
  misc_feature 1..21: note = Synthetic
  source 1..21: mol_type = other DNA
cgaggagcaaggcgacggtcc

SEQ ID NO: 12169 - DNA, 21 bp, synthetic construct
  misc_feature 1..21: note = Synthetic
  source 1..21: mol_type = other DNA
cgaggagcacgatggggagga

SEQ ID NO: 12170 - DNA, 21 bp, synthetic construct
  misc_feature 1..21: note = Synthetic
  source 1..21: mol_type = other DNA
cgaggagcactgtagggagag

SEQ ID NO: 12171 - DNA, 21 bp, synthetic construct
  misc_feature 1..21: note = Synthetic
  source 1..21: mol_type = other DNA
cgaggccttgagggtggccgg

SEQ ID NO: 12172 - DNA, 21 bp, synthetic construct
  misc_feature 1..21: note = Synthetic
  source 1..21: mol_type = other DNA
cgagggcgccccccaggacaa

SEQ ID NO: 12173 - DNA, 21 bp, synthetic construct
  misc_feature 1..21: note = Synthetic
  source 1..21: mol_type = other DNA
cgaggggtagctgtagccgtc

SEQ ID NO: 12174 - DNA, 21 bp, synthetic construct
  misc_feature 1..21: note = Synthetic
  source 1..21: mol_type = other DNA
cgaggtctcaggaagggttct

SEQ ID NO: 12175 - DNA, 21 bp, synthetic construct
  misc_feature 1..21: note = Synthetic
  source 1..21: mol_type = other DNA
cgagtagatgtccacaccatt

SEQ ID NO: 12176 - DNA, 21 bp, synthetic construct
  misc_feature 1..21: note = Synthetic
  source 1..21: mol_type = other DNA
cgagtagctgggactacaggt

SEQ ID NO: 12177 - DNA, 21 bp, synthetic construct
  misc_feature 1..21: note = Synthetic
  source 1..21: mol_type = other DNA
cgagtgggggttgatctgcgg

SEQ ID NO: 12178 - DNA, 21 bp, synthetic construct
  misc_feature 1..21: note = Synthetic
  source 1..21: mol_type = other DNA
cgatatcgcactctttgatgg

SEQ ID NO: 12179 - DNA, 21 bp, synthetic construct
  misc_feature 1..21: note = Synthetic
  source 1..21: mol_type = other DNA
cgatatcttcgcatcttcgct

SEQ ID NO: 12180 - DNA, 21 bp, synthetic construct
  misc_feature 1..21: note = Synthetic
  source 1..21: mol_type = other DNA
cgatattcacgatcacggctt

SEQ ID NO: 12181 - DNA, 21 bp, synthetic construct
  misc_feature 1..21: note = Synthetic
  source 1..21: mol_type = other DNA
cgatcacggctttgaagtccc

SEQ ID NO: 12182 - DNA, 21 bp, synthetic construct
  misc_feature 1..21: note = Synthetic
  source 1..21: mol_type = other DNA
cgatcatggctcactgcaacc

SEQ ID NO: 12183 - DNA, 21 bp, synthetic construct
  misc_feature 1..21: note = Synthetic
  source 1..21: mol_type = other DNA
cgatccagactggaggattta

SEQ ID NO: 12184 - DNA, 21 bp, synthetic construct
  misc_feature 1..21: note = Synthetic
  source 1..21: mol_type = other DNA
cgatcctcctgcctcagcctc

SEQ ID NO: 12185 - DNA, 21 bp, synthetic construct
  misc_feature 1..21: note = Synthetic
  source 1..21: mol_type = other DNA
cgatctcctgacctcatgatc

SEQ ID NO: 12186 - DNA, 21 bp, synthetic construct
  misc_feature 1..21: note = Synthetic
  source 1..21: mol_type = other DNA
cgatcttaaggtcattgcaga

SEQ ID NO: 12187 - DNA, 21 bp, synthetic construct
  misc_feature 1..21: note = Synthetic
  source 1..21: mol_type = other DNA
cgatgcttgagatggagtgaa

SEQ ID NO: 12188 - DNA, 21 bp, synthetic construct
  misc_feature 1..21: note = Synthetic
  source 1..21: mol_type = other DNA
cgatggagcccacagccttgc

SEQ ID NO: 12189 - DNA, 21 bp, synthetic construct
  misc_feature 1..21: note = Synthetic
  source 1..21: mol_type = other DNA
cgatggcccttggcttggagc

SEQ ID NO: 12190 - DNA, 21 bp, synthetic construct
  misc_feature 1..21: note = Synthetic
  source 1..21: mol_type = other DNA
cgatggggaggacaatggaca

SEQ ID NO: 12191 - DNA, 21 bp, synthetic construct
  misc_feature 1..21: note = Synthetic
  source 1..21: mol_type = other DNA
cgatttcagaaagaacctgaa

SEQ ID NO: 12192 - DNA, 21 bp, synthetic construct
  misc_feature 1..21: note = Synthetic
  source 1..21: mol_type = other DNA
cgcaacagagacagtgcccag

SEQ ID NO: 12193 - DNA, 21 bp, synthetic construct
  misc_feature 1..21: note = Synthetic
  source 1..21: mol_type = other DNA
cgcaatctcggctcactgcaa

SEQ ID NO: 12194 - DNA, 21 bp, synthetic construct
  misc_feature 1..21: note = Synthetic
  source 1..21: mol_type = other DNA
cgcaatttccagccccagggc

SEQ ID NO: 12195 - DNA, 21 bp, synthetic construct
  misc_feature 1..21: note = Synthetic
  source 1..21: mol_type = other DNA
cgcacctccagaactgaggaa

SEQ ID NO: 12196 - DNA, 21 bp, synthetic construct
  misc_feature 1..21: note = Synthetic
  source 1..21: mol_type = other DNA
cgcactctttgatgggttcat

SEQ ID NO: 12197 - DNA, 21 bp, synthetic construct
  misc_feature 1..21: note = Synthetic
  source 1..21: mol_type = other DNA
cgcagacccacttgtaggaga

SEQ ID NO: 12198 - DNA, 21 bp, synthetic construct
  misc_feature 1..21: note = Synthetic
  source 1..21: mol_type = other DNA
cgcagagctggctgcaggtgt

SEQ ID NO: 12199 - DNA, 21 bp, synthetic construct
  misc_feature 1..21: note = Synthetic
  source 1..21: mol_type = other DNA
cgcagagtgtcacattaacgc

SEQ ID NO: 12200 - DNA, 21 bp, synthetic construct
  misc_feature 1..21: note = Synthetic
  source 1..21: mol_type = other DNA
cgcagagtgtcagacagcctt

SEQ ID NO: 12201 - DNA, 21 bp, synthetic construct
  misc_feature 1..21: note = Synthetic
  source 1..21: mol_type = other DNA
cgcagccaacttcatcgctca

SEQ ID NO: 12202 - DNA, 21 bp, synthetic construct
  misc_feature 1..21: note = Synthetic
  source 1..21: mol_type = other DNA
cgcagcctctgccaggcagtg

SEQ ID NO: 12203 - DNA, 21 bp, synthetic construct
  misc_feature 1..21: note = Synthetic
  source 1..21: mol_type = other DNA
cgcaggcccacagctggggga

SEQ ID NO: 12204 - DNA, 21 bp, synthetic construct
  misc_feature 1..21: note = Synthetic
  source 1..21: mol_type = other DNA
cgcaggtaaacttgggcgagt

SEQ ID NO: 12205 - DNA, 21 bp, synthetic construct
  misc_feature 1..21: note = Synthetic
  source 1..21: mol_type = other DNA
cgcagtccacttggccatcgc

SEQ ID NO: 12206 - DNA, 21 bp, synthetic construct
  misc_feature 1..21: note = Synthetic
  source 1..21: mol_type = other DNA
cgcagtcggggtcgttgtcgc

SEQ ID NO: 12207 - DNA, 21 bp, synthetic construct
  misc_feature 1..21: note = Synthetic
  source 1..21: mol_type = other DNA
cgcagttttcctcgtcagatt

SEQ ID NO: 12208 - DNA, 21 bp, synthetic construct
  misc_feature 1..21: note = Synthetic
  source 1..21: mol_type = other DNA
cgcatctgtcgcccacgtggc

SEQ ID NO: 12209 - DNA, 21 bp, synthetic construct
  misc_feature 1..21: note = Synthetic
  source 1..21: mol_type = other DNA
cgcatctgtcgcccactgcag

SEQ ID NO: 12210 - DNA, 21 bp, synthetic construct
  misc_feature 1..21: note = Synthetic
  source 1..21: mol_type = other DNA
cgcatcttcgctgggccacca

SEQ ID NO: 12211 - DNA, 21 bp, synthetic construct
  misc_feature 1..21: note = Synthetic
  source 1..21: mol_type = other DNA
cgcatttacgtgctccgaaac

SEQ ID NO: 12212 - DNA, 21 bp, synthetic construct
  misc_feature 1..21: note = Synthetic
  source 1..21: mol_type = other DNA
cgccacagagcacagcggaaa

SEQ ID NO: 12213 - DNA, 21 bp, synthetic construct
  misc_feature 1..21: note = Synthetic
  source 1..21: mol_type = other DNA
cgccaccacgcccggctaatt

SEQ ID NO: 12214 - DNA, 21 bp, synthetic construct
  misc_feature 1..21: note = Synthetic
  source 1..21: mol_type = other DNA
cgccacgtcatcctccagact

SEQ ID NO: 12215 - DNA, 21 bp, synthetic construct
  misc_feature 1..21: note = Synthetic
  source 1..21: mol_type = other DNA
cgccacttaggcagtggaact

SEQ ID NO: 12216 - DNA, 21 bp, synthetic construct
  misc_feature 1..21: note = Synthetic
  source 1..21: mol_type = other DNA
cgccagctggagtggatgcac

SEQ ID NO: 12217 - DNA, 21 bp, synthetic construct
  misc_feature 1..21: note = Synthetic
  source 1..21: mol_type = other DNA
cgccaggagggcccaggataa

SEQ ID NO: 12218 - DNA, 21 bp, synthetic construct
  misc_feature 1..21: note = Synthetic
  source 1..21: mol_type = other DNA
cgccagttcttccatagaagg

SEQ ID NO: 12219 - DNA, 21 bp, synthetic construct
  misc_feature 1..21: note = Synthetic
  source 1..21: mol_type = other DNA
cgccatgaatccctttcctgg

SEQ ID NO: 12220 - DNA, 21 bp, synthetic construct
  misc_feature 1..21: note = Synthetic
  source 1..21: mol_type = other DNA
cgccatgcctggccagaggcc

SEQ ID NO: 12221 - DNA, 21 bp, synthetic construct
  misc_feature 1..21: note = Synthetic
  source 1..21: mol_type = other DNA
cgccattgctcagggtggtcc

SEQ ID NO: 12222 - DNA, 21 bp, synthetic construct
  misc_feature 1..21: note = Synthetic
  source 1..21: mol_type = other DNA
cgcccacgtggctgaagatct

SEQ ID NO: 12223 - DNA, 21 bp, synthetic construct
  misc_feature 1..21: note = Synthetic
  source 1..21: mol_type = other DNA
cgcccactgcagtccccgccg

SEQ ID NO: 12224 - DNA, 21 bp, synthetic construct
  misc_feature 1..21: note = Synthetic
  source 1..21: mol_type = other DNA
cgcccagagcttggtgagaca

SEQ ID NO: 12225 - DNA, 21 bp, synthetic construct
  misc_feature 1..21: note = Synthetic
  source 1..21: mol_type = other DNA
cgcccaggccagactgcggac

SEQ ID NO: 12226 - DNA, 21 bp, synthetic construct
  misc_feature 1..21: note = Synthetic
  source 1..21: mol_type = other DNA
cgccccccaggacaaggtggg

SEQ ID NO: 12227 - DNA, 21 bp, synthetic construct
  misc_feature 1..21: note = Synthetic
  source 1..21: mol_type = other DNA
cgcccggcctcaccgtgcatg

SEQ ID NO: 12228 - DNA, 21 bp, synthetic construct
  misc_feature 1..21: note = Synthetic
  source 1..21: mol_type = other DNA
cgcccggctaattttttgtat

SEQ ID NO: 12229 - DNA, 21 bp, synthetic construct
  misc_feature 1..21: note = Synthetic
  source 1..21: mol_type = other DNA
cgcccttggtatccgcaacag

SEQ ID NO: 12230 - DNA, 21 bp, synthetic construct
  misc_feature 1..21: note = Synthetic
  source 1..21: mol_type = other DNA
cgccgcggcgaggagcaaggc

SEQ ID NO: 12231 - DNA, 21 bp, synthetic construct
  misc_feature 1..21: note = Synthetic
  source 1..21: mol_type = other DNA
cgccgctgtgacacttgaact

SEQ ID NO: 12232 - DNA, 21 bp, synthetic construct
  misc_feature 1..21: note = Synthetic
  source 1..21: mol_type = other DNA
cgccgtgggctctgtcaagct

SEQ ID NO: 12233 - DNA, 21 bp, synthetic construct
  misc_feature 1..21: note = Synthetic
  source 1..21: mol_type = other DNA
cgccgttgttgtccaagcatt

SEQ ID NO: 12234 - DNA, 21 bp, synthetic construct
  misc_feature 1..21: note = Synthetic
  source 1..21: mol_type = other DNA
cgcctcggcctcccaaagtgc

SEQ ID NO: 12235 - DNA, 21 bp, synthetic construct
  misc_feature 1..21: note = Synthetic
  source 1..21: mol_type = other DNA
cgcctttgtgacaggaaccgc

SEQ ID NO: 12236 - DNA, 21 bp, synthetic construct
  misc_feature 1..21: note = Synthetic
  source 1..21: mol_type = other DNA
cgcggaggaacgccaggcctc

SEQ ID NO: 12237 - DNA, 21 bp, synthetic construct
  misc_feature 1..21: note = Synthetic
  source 1..21: mol_type = other DNA
cgcggaggcggctccggggac

SEQ ID NO: 12238 - DNA, 21 bp, synthetic construct
  misc_feature 1..21: note = Synthetic
  source 1..21: mol_type = other DNA
cgcggcgaggagcaaggcgac

SEQ ID NO: 12239 - DNA, 21 bp, synthetic construct
  misc_feature 1..21: note = Synthetic
  source 1..21: mol_type = other DNA
cgcgggagtctgacggaggct

SEQ ID NO: 12240 - DNA, 21 bp, synthetic construct
  misc_feature 1..21: note = Synthetic
  source 1..21: mol_type = other DNA
cgctactgggcttcttctcat

SEQ ID NO: 12241 - DNA, 21 bp, synthetic construct
  misc_feature 1..21: note = Synthetic
  source 1..21: mol_type = other DNA
cgctcatgtccttgcagtcat

SEQ ID NO: 12242 - DNA, 21 bp, synthetic construct
  misc_feature 1..21: note = Synthetic
  source 1..21: mol_type = other DNA
cgctccggtccagcgtcatct

SEQ ID NO: 12243 - DNA, 21 bp, synthetic construct
  misc_feature 1..21: note = Synthetic
  source 1..21: mol_type = other DNA
cgctctgtcacacagctgccc

SEQ ID NO: 12244 - DNA, 21 bp, synthetic construct
  misc_feature 1..21: note = Synthetic
  source 1..21: mol_type = other DNA
cgctctgtcgcccaggccaga

SEQ ID NO: 12245 - DNA, 21 bp, synthetic construct
  misc_feature 1..21: note = Synthetic
  source 1..21: mol_type = other DNA
cgctgccatcgcagacccact

SEQ ID NO: 12246 - DNA, 21 bp, synthetic construct
  misc_feature 1..21: note = Synthetic
  source 1..21: mol_type = other DNA
cgctgcggccactcatccgag

SEQ ID NO: 12247 - DNA, 21 bp, synthetic construct
  misc_feature 1..21: note = Synthetic
  source 1..21: mol_type = other DNA
cgctgggccaccagctggaag

SEQ ID NO: 12248 - DNA, 21 bp, synthetic construct
  misc_feature 1..21: note = Synthetic
  source 1..21: mol_type = other DNA
cgctgtgacacttgaacttgt

SEQ ID NO: 12249 - DNA, 21 bp, synthetic construct
  misc_feature 1..21: note = Synthetic
  source 1..21: mol_type = other DNA
cgcttcccgggttcacaccat

SEQ ID NO: 12250 - DNA, 21 bp, synthetic construct
  misc_feature 1..21: note = Synthetic
  source 1..21: mol_type = other DNA
cgctttgttgctcaggcctgg

SEQ ID NO: 12251 - DNA, 21 bp, synthetic construct
  misc_feature 1..21: note = Synthetic
  source 1..21: mol_type = other DNA
cggaaaccggggacttcgcca

SEQ ID NO: 12252 - DNA, 21 bp, synthetic construct
  misc_feature 1..21: note = Synthetic
  source 1..21: mol_type = other DNA
cggaacctgtgaggcggttgg

SEQ ID NO: 12253 - DNA, 21 bp, synthetic construct
  misc_feature 1..21: note = Synthetic
  source 1..21: mol_type = other DNA
cggacataaagacgacaatgg

SEQ ID NO: 12254 - DNA, 21 bp, synthetic construct
  misc_feature 1..21: note = Synthetic
  source 1..21: mol_type = other DNA
cggacatcagtgcaacagtaa

SEQ ID NO: 12255 - DNA, 21 bp, synthetic construct
  misc_feature 1..21: note = Synthetic
  source 1..21: mol_type = other DNA
cggactgcagtggcgcaatct

SEQ ID NO: 12256 - DNA, 21 bp, synthetic construct
  misc_feature 1..21: note = Synthetic
  source 1..21: mol_type = other DNA
cggaggaacgccaggcctccc

SEQ ID NO: 12257 - DNA, 21 bp, synthetic construct
  misc_feature 1..21: note = Synthetic
  source 1..21: mol_type = other DNA
cggaggcggctccggggaccc

SEQ ID NO: 12258 - DNA, 21 bp, synthetic construct
  misc_feature 1..21: note = Synthetic
  source 1..21: mol_type = other DNA
cggaggctgtcactgtctctc

SEQ ID NO: 12259 - DNA, 21 bp, synthetic construct
  misc_feature 1..21: note = Synthetic
  source 1..21: mol_type = other DNA
cggagggcgactcgtgtatgt

SEQ ID NO: 12260 - DNA, 21 bp, synthetic construct
  misc_feature 1..21: note = Synthetic
  source 1..21: mol_type = other DNA
cggaggtgtcgccacagagca

SEQ ID NO: 12261 - DNA, 21 bp, synthetic construct
  misc_feature 1..21: note = Synthetic
  source 1..21: mol_type = other DNA
cggagtctcgctctgtcgccc

SEQ ID NO: 12262 - DNA, 21 bp, synthetic construct
  misc_feature 1..21: note = Synthetic
  source 1..21: mol_type = other DNA
cggatcacgacctgctgtgtc

SEQ ID NO: 12263 - DNA, 21 bp, synthetic construct
  misc_feature 1..21: note = Synthetic
  source 1..21: mol_type = other DNA
cggattcagccagatcatttc

SEQ ID NO: 12264 - DNA, 21 bp, synthetic construct
  misc_feature 1..21: note = Synthetic
  source 1..21: mol_type = other DNA
cggatttgcaggtgacagaca

SEQ ID NO: 12265 - DNA, 21 bp, synthetic construct
  misc_feature 1..21: note = Synthetic
  source 1..21: mol_type = other DNA
cggcagtctctagccatgttg

SEQ ID NO: 12266 - DNA, 21 bp, synthetic construct
  misc_feature 1..21: note = Synthetic
  source 1..21: mol_type = other DNA
cggcattcattgacacgggct

SEQ ID NO: 12267 - DNA, 21 bp, synthetic construct
  misc_feature 1..21: note = Synthetic
  source 1..21: mol_type = other DNA
cggccaaggagaaggggtggg

SEQ ID NO: 12268 - DNA, 21 bp, synthetic construct
  misc_feature 1..21: note = Synthetic
  source 1..21: mol_type = other DNA
cggccaaggtaaccgggtgtc

SEQ ID NO: 12269 - DNA, 21 bp, synthetic construct
  misc_feature 1..21: note = Synthetic
  source 1..21: mol_type = other DNA
cggccactcatccgagccatc

SEQ ID NO: 12270 - DNA, 21 bp, synthetic construct
  misc_feature 1..21: note = Synthetic
  source 1..21: mol_type = other DNA
cggccactgaggagatctagg

SEQ ID NO: 12271 - DNA, 21 bp, synthetic construct
  misc_feature 1..21: note = Synthetic
  source 1..21: mol_type = other DNA
cggcccccacagctgaagtcc

SEQ ID NO: 12272 - DNA, 21 bp, synthetic construct
  misc_feature 1..21: note = Synthetic
  source 1..21: mol_type = other DNA
cggcctcaccgtgcatgtttt

SEQ ID NO: 12273 - DNA, 21 bp, synthetic construct
  misc_feature 1..21: note = Synthetic
  source 1..21: mol_type = other DNA
cggcctcccaaagtgctggga

SEQ ID NO: 12274 - DNA, 21 bp, synthetic construct
  misc_feature 1..21: note = Synthetic
  source 1..21: mol_type = other DNA
cggcgaggagcaaggcgacgg

SEQ ID NO: 12275 - DNA, 21 bp, synthetic construct
  misc_feature 1..21: note = Synthetic
  source 1..21: mol_type = other DNA
cggcgaggtctcaggaagggt

SEQ ID NO: 12276 - DNA, 21 bp, synthetic construct
  misc_feature 1..21: note = Synthetic
  source 1..21: mol_type = other DNA
cggcgatttcagaaagaacct

SEQ ID NO: 12277 - DNA, 21 bp, synthetic construct
  misc_feature 1..21: note = Synthetic
  source 1..21: mol_type = other DNA
cggctaattttttgtattttt

SEQ ID NO: 12278 - DNA, 21 bp, synthetic construct
  misc_feature 1..21: note = Synthetic
  source 1..21: mol_type = other DNA
cggctcactgcaagctccgct

SEQ ID NO: 12279 - DNA, 21 bp, synthetic construct
  misc_feature 1..21: note = Synthetic
  source 1..21: mol_type = other DNA
cggctccggggacccgggact

SEQ ID NO: 12280 - DNA, 21 bp, synthetic construct
  misc_feature 1..21: note = Synthetic
  source 1..21: mol_type = other DNA
cggctgcagaccaaggagggg

SEQ ID NO: 12281 - DNA, 21 bp, synthetic construct
  misc_feature 1..21: note = Synthetic
  source 1..21: mol_type = other DNA
cggctgccatggatgcagttt

SEQ ID NO: 12282 - DNA, 21 bp, synthetic construct
  misc_feature 1..21: note = Synthetic
  source 1..21: mol_type = other DNA
cggctgtggagctgaccttta

SEQ ID NO: 12283 - DNA, 21 bp, synthetic construct
  misc_feature 1..21: note = Synthetic
  source 1..21: mol_type = other DNA
cggctttgaagtcccggtcaa

SEQ ID NO: 12284 - DNA, 21 bp, synthetic construct
  misc_feature 1..21: note = Synthetic
  source 1..21: mol_type = other DNA
cgggaacaggtcgggtggttg

SEQ ID NO: 12285 - DNA, 21 bp, synthetic construct
  misc_feature 1..21: note = Synthetic
  source 1..21: mol_type = other DNA
cgggaatggaagtgggtaggg

SEQ ID NO: 12286 - DNA, 21 bp, synthetic construct
  misc_feature 1..21: note = Synthetic
  source 1..21: mol_type = other DNA
cgggaccacaggtgagcaccg

SEQ ID NO: 12287 - DNA, 21 bp, synthetic construct
  misc_feature 1..21: note = Synthetic
  source 1..21: mol_type = other DNA
cgggactccaggcagatgttc

SEQ ID NO: 12288 - DNA, 21 bp, synthetic construct
  misc_feature 1..21: note = Synthetic
  source 1..21: mol_type = other DNA
cgggacttgtcgtcgcctttg

SEQ ID NO: 12289 - DNA, 21 bp, synthetic construct
  misc_feature 1..21: note = Synthetic
  source 1..21: mol_type = other DNA
cgggaggatgggcaccaggct

SEQ ID NO: 12290 - DNA, 21 bp, synthetic construct
  misc_feature 1..21: note = Synthetic
  source 1..21: mol_type = other DNA
cgggaggtgtcgggaacaggt

SEQ ID NO: 12291 - DNA, 21 bp, synthetic construct
  misc_feature 1..21: note = Synthetic
  source 1..21: mol_type = other DNA
cgggagtctgacggaggctgt

SEQ ID NO: 12292 - DNA, 21 bp, synthetic construct
  misc_feature 1..21: note = Synthetic
  source 1..21: mol_type = other DNA
cgggagttccccagtcagtcc

SEQ ID NO: 12293 - DNA, 21 bp, synthetic construct
  misc_feature 1..21: note = Synthetic
  source 1..21: mol_type = other DNA
cgggatcctgacactcatcga

SEQ ID NO: 12294 - DNA, 21 bp, synthetic construct
  misc_feature 1..21: note = Synthetic
  source 1..21: mol_type = other DNA
cgggcaggaggcctcgtctga

SEQ ID NO: 12295 - DNA, 21 bp, synthetic construct
  misc_feature 1..21: note = Synthetic
  source 1..21: mol_type = other DNA
cgggcaggcgcaggtaaactt

SEQ ID NO: 12296 - DNA, 21 bp, synthetic construct
  misc_feature 1..21: note = Synthetic
  source 1..21: mol_type = other DNA
cgggcctgtttctcttatcct

SEQ ID NO: 12297 - DNA, 21 bp, synthetic construct
  misc_feature 1..21: note = Synthetic
  source 1..21: mol_type = other DNA
cgggctttccctggcctggga

SEQ ID NO: 12298 - DNA, 21 bp, synthetic construct
  misc_feature 1..21: note = Synthetic
  source 1..21: mol_type = other DNA
cggggacatcattctcccaaa

SEQ ID NO: 12299 - DNA, 21 bp, synthetic construct
  misc_feature 1..21: note = Synthetic
  source 1..21: mol_type = other DNA
cggggacccgggacttgtcgt

SEQ ID NO: 12300 - DNA, 21 bp, synthetic construct
  misc_feature 1..21: note = Synthetic
  source 1..21: mol_type = other DNA
cggggacttcgccaggagggc

SEQ ID NO: 12301 - DNA, 21 bp, synthetic construct
  misc_feature 1..21: note = Synthetic
  source 1..21: mol_type = other DNA
cggggagattctgaggcaacg

SEQ ID NO: 12302 - DNA, 21 bp, synthetic construct
  misc_feature 1..21: note = Synthetic
  source 1..21: mol_type = other DNA
cggggcacaggcactcgtagc

SEQ ID NO: 12303 - DNA, 21 bp, synthetic construct
  misc_feature 1..21: note = Synthetic
  source 1..21: mol_type = other DNA
cggggcagggaggcacagata

SEQ ID NO: 12304 - DNA, 21 bp, synthetic construct
  misc_feature 1..21: note = Synthetic
  source 1..21: mol_type = other DNA
cggggccaccatcacagcgcc

SEQ ID NO: 12305 - DNA, 21 bp, synthetic construct
  misc_feature 1..21: note = Synthetic
  source 1..21: mol_type = other DNA
cggggctggtggggcgagggc

SEQ ID NO: 12306 - DNA, 21 bp, synthetic construct
  misc_feature 1..21: note = Synthetic
  source 1..21: mol_type = other DNA
cgggggcccctctgtgaactt

SEQ ID NO: 12307 - DNA, 21 bp, synthetic construct
  misc_feature 1..21: note = Synthetic
  source 1..21: mol_type = other DNA
cgggggcctggatgtctctgc

SEQ ID NO: 12308 - DNA, 21 bp, synthetic construct
  misc_feature 1..21: note = Synthetic
  source 1..21: mol_type = other DNA
cgggggtgacagggcaaaggc

SEQ ID NO: 12309 - DNA, 21 bp, synthetic construct
  misc_feature 1..21: note = Synthetic
  source 1..21: mol_type = other DNA
cggggtcgttgtcgcaggccc

SEQ ID NO: 12310 - DNA, 21 bp, synthetic construct
  misc_feature 1..21: note = Synthetic
  source 1..21: mol_type = other DNA
cggggttgtcaaagttgatgc

SEQ ID NO: 12311 - DNA, 21 bp, synthetic construct
  misc_feature 1..21: note = Synthetic
  source 1..21: mol_type = other DNA
cggggtttcacgtgttagcca

SEQ ID NO: 12312 - DNA, 21 bp, synthetic construct
  misc_feature 1..21: note = Synthetic
  source 1..21: mol_type = other DNA
cgggtggttgtgtgctgtgtc

SEQ ID NO: 12313 - DNA, 21 bp, synthetic construct
  misc_feature 1..21: note = Synthetic
  source 1..21: mol_type = other DNA
cgggtgtctcaggcacttaat

SEQ ID NO: 12314 - DNA, 21 bp, synthetic construct
  misc_feature 1..21: note = Synthetic
  source 1..21: mol_type = other DNA
cgggttcacaccattctcctg

SEQ ID NO: 12315 - DNA, 21 bp, synthetic construct
  misc_feature 1..21: note = Synthetic
  source 1..21: mol_type = other DNA
cggtcaacctgcccctctctg

SEQ ID NO: 12316 - DNA, 21 bp, synthetic construct
  misc_feature 1..21: note = Synthetic
  source 1..21: mol_type = other DNA
cggtcacactgccggctgcca

SEQ ID NO: 12317 - DNA, 21 bp, synthetic construct
  misc_feature 1..21: note = Synthetic
  source 1..21: mol_type = other DNA
cggtccagcgcaatttccagc

SEQ ID NO: 12318 - DNA, 21 bp, synthetic construct
  misc_feature 1..21: note = Synthetic
  source 1..21: mol_type = other DNA
cggtccagcgtcatcttcctg

SEQ ID NO: 12319 - DNA, 21 bp, synthetic construct
  misc_feature 1..21: note = Synthetic
  source 1..21: mol_type = other DNA
cggtccagtagatgttgctgt

SEQ ID NO: 12320 - DNA, 21 bp, synthetic construct
  misc_feature 1..21: note = Synthetic
  source 1..21: mol_type = other DNA
cggtctgagtcacagacgaac

SEQ ID NO: 12321 - DNA, 21 bp, synthetic construct
  misc_feature 1..21: note = Synthetic
  source 1..21: mol_type = other DNA
cggtgccaccacggattcagc

SEQ ID NO: 12322 - DNA, 21 bp, synthetic construct
  misc_feature 1..21: note = Synthetic
  source 1..21: mol_type = other DNA
cggtggagagaaactcaaaac

SEQ ID NO: 12323 - DNA, 21 bp, synthetic construct
  misc_feature 1..21: note = Synthetic
  source 1..21: mol_type = other DNA
cggtggatgtctcctgggtgg

SEQ ID NO: 12324 - DNA, 21 bp, synthetic construct
  misc_feature 1..21: note = Synthetic
  source 1..21: mol_type = other DNA
cggtgtcataggaagagacgc

SEQ ID NO: 12325 - DNA, 21 bp, synthetic construct
  misc_feature 1..21: note = Synthetic
  source 1..21: mol_type = other DNA
cggttccctgcactggggggg

SEQ ID NO: 12326 - DNA, 21 bp, synthetic construct
  misc_feature 1..21: note = Synthetic
  source 1..21: mol_type = other DNA
cggttgacacggcccccacag

SEQ ID NO: 12327 - DNA, 21 bp, synthetic construct
  misc_feature 1..21: note = Synthetic
  source 1..21: mol_type = other DNA
cggttgcccccgttgacatcg

SEQ ID NO: 12328 - DNA, 21 bp, synthetic construct
  misc_feature 1..21: note = Synthetic
  source 1..21: mol_type = other DNA
cggttggcactgaaaatggct

SEQ ID NO: 12329 - DNA, 21 bp, synthetic construct
  misc_feature 1..21: note = Synthetic
  source 1..21: mol_type = other DNA
cggttggtgaagaagaggtag

SEQ ID NO: 12330 - DNA, 21 bp, synthetic construct
  misc_feature 1..21: note = Synthetic
  source 1..21: mol_type = other DNA
cgtaaagacccctacagcgct

SEQ ID NO: 12331 - DNA, 21 bp, synthetic construct
  misc_feature 1..21: note = Synthetic
  source 1..21: mol_type = other DNA
cgtaaggaaccgaggccttga

SEQ ID NO: 12332 - DNA, 21 bp, synthetic construct
  misc_feature 1..21: note = Synthetic
  source 1..21: mol_type = other DNA
cgtacccagctgatttttaac

SEQ ID NO: 12333 - DNA, 21 bp, synthetic construct
  misc_feature 1..21: note = Synthetic
  source 1..21: mol_type = other DNA
cgtagccgatcttaaggtcat

SEQ ID NO: 12334 - DNA, 21 bp, synthetic construct
  misc_feature 1..21: note = Synthetic
  source 1..21: mol_type = other DNA
cgtcaaacgatccagactgga

SEQ ID NO: 12335 - DNA, 21 bp, synthetic construct
  misc_feature 1..21: note = Synthetic
  source 1..21: mol_type = other DNA
cgtcagatttgtccttgcagt

SEQ ID NO: 12336 - DNA, 21 bp, synthetic construct
  misc_feature 1..21: note = Synthetic
  source 1..21: mol_type = other DNA
cgtcagggcgacaggtggcca

SEQ ID NO: 12337 - DNA, 21 bp, synthetic construct
  misc_feature 1..21: note = Synthetic
  source 1..21: mol_type = other DNA
cgtcatcctccagactgacca

SEQ ID NO: 12338 - DNA, 21 bp, synthetic construct
  misc_feature 1..21: note = Synthetic
  source 1..21: mol_type = other DNA
cgtcatcttcctgacctcgtg

SEQ ID NO: 12339 - DNA, 21 bp, synthetic construct
  misc_feature 1..21: note = Synthetic
  source 1..21: mol_type = other DNA
cgtccaagcagtcccggtctg

SEQ ID NO: 12340 - DNA, 21 bp, synthetic construct
  misc_feature 1..21: note = Synthetic
  source 1..21: mol_type = other DNA
cgtccgggcaggcgcaggtaa

SEQ ID NO: 12341 - DNA, 21 bp, synthetic construct
  misc_feature 1..21: note = Synthetic
  source 1..21: mol_type = other DNA
cgtcctgggagcacgtcttgg

SEQ ID NO: 12342 - DNA, 21 bp, synthetic construct
  misc_feature 1..21: note = Synthetic
  source 1..21: mol_type = other DNA
cgtcctggttgtggcaaatgt

SEQ ID NO: 12343 - DNA, 21 bp, synthetic construct
  misc_feature 1..21: note = Synthetic
  source 1..21: mol_type = other DNA
cgtcgcccagagcttggtgag

SEQ ID NO: 12344 - DNA, 21 bp, synthetic construct
  misc_feature 1..21: note = Synthetic
  source 1..21: mol_type = other DNA
cgtcgcctttgtgacaggaac

SEQ ID NO: 12345 - DNA, 21 bp, synthetic construct
  misc_feature 1..21: note = Synthetic
  source 1..21: mol_type = other DNA
cgtcggggcacaggcactcgt

SEQ ID NO: 12346 - DNA, 21 bp, synthetic construct
  misc_feature 1..21: note = Synthetic
  source 1..21: mol_type = other DNA
cgtcgggggcctggatgtctc

SEQ ID NO: 12347 - DNA, 21 bp, synthetic construct
  misc_feature 1..21: note = Synthetic
  source 1..21: mol_type = other DNA
cgtctcctgggactcatcaga

SEQ ID NO: 12348 - DNA, 21 bp, synthetic construct
  misc_feature 1..21: note = Synthetic
  source 1..21: mol_type = other DNA
cgtctgagccgtccaagcagt

SEQ ID NO: 12349 - DNA, 21 bp, synthetic construct
  misc_feature 1..21: note = Synthetic
  source 1..21: mol_type = other DNA
cgtctgagccgttgtcgcagt

SEQ ID NO: 12350 - DNA, 21 bp, synthetic construct
  misc_feature 1..21: note = Synthetic
  source 1..21: mol_type = other DNA
cgtcttggcactggaactcgt

SEQ ID NO: 12351 - DNA, 21 bp, synthetic construct
  misc_feature 1..21: note = Synthetic
  source 1..21: mol_type = other DNA
cgtcttgggggagcacgtctc

SEQ ID NO: 12352 - DNA, 21 bp, synthetic construct
  misc_feature 1..21: note = Synthetic
  source 1..21: mol_type = other DNA
cgtcttggggggacagccttg

SEQ ID NO: 12353 - DNA, 21 bp, synthetic construct
  misc_feature 1..21: note = Synthetic
  source 1..21: mol_type = other DNA
cgtgagccactgcgcccggcc

SEQ ID NO: 12354 - DNA, 21 bp, synthetic construct
  misc_feature 1..21: note = Synthetic
  source 1..21: mol_type = other DNA
cgtgaggcacctgtgtctggc

SEQ ID NO: 12355 - DNA, 21 bp, synthetic construct
  misc_feature 1..21: note = Synthetic
  source 1..21: mol_type = other DNA
cgtgcaaataatctttgtaca

SEQ ID NO: 12356 - DNA, 21 bp, synthetic construct
  misc_feature 1..21: note = Synthetic
  source 1..21: mol_type = other DNA
cgtgcatgttttaaacacata

SEQ ID NO: 12357 - DNA, 21 bp, synthetic construct
  misc_feature 1..21: note = Synthetic
  source 1..21: mol_type = other DNA
cgtgccaccgtacccagctga

SEQ ID NO: 12358 - DNA, 21 bp, synthetic construct
  misc_feature 1..21: note = Synthetic
  source 1..21: mol_type = other DNA
cgtgccggttggtgaagaaga

SEQ ID NO: 12359 - DNA, 21 bp, synthetic construct
  misc_feature 1..21: note = Synthetic
  source 1..21: mol_type = other DNA
cgtgctccgaaaccagaaagg

SEQ ID NO: 12360 - DNA, 21 bp, synthetic construct
  misc_feature 1..21: note = Synthetic
  source 1..21: mol_type = other DNA
cgtggcagcgaaactcgtcct

SEQ ID NO: 12361 - DNA, 21 bp, synthetic construct
  misc_feature 1..21: note = Synthetic
  source 1..21: mol_type = other DNA
cgtggcgatggggaggacaat

SEQ ID NO: 12362 - DNA, 21 bp, synthetic construct
  misc_feature 1..21: note = Synthetic
  source 1..21: mol_type = other DNA
cgtggctgaagatctcggctg

SEQ ID NO: 12363 - DNA, 21 bp, synthetic construct
  misc_feature 1..21: note = Synthetic
  source 1..21: mol_type = other DNA
cgtgggaacagccgccgttgt

SEQ ID NO: 12364 - DNA, 21 bp, synthetic construct
  misc_feature 1..21: note = Synthetic
  source 1..21: mol_type = other DNA
cgtgggctctgtcaagctggg

SEQ ID NO: 12365 - DNA, 21 bp, synthetic construct
  misc_feature 1..21: note = Synthetic
  source 1..21: mol_type = other DNA
cgtggtgagcccaggggtggc

SEQ ID NO: 12366 - DNA, 21 bp, synthetic construct
  misc_feature 1..21: note = Synthetic
  source 1..21: mol_type = other DNA
cgtgtatgtcgcggaggcggc

SEQ ID NO: 12367 - DNA, 21 bp, synthetic construct
  misc_feature 1..21: note = Synthetic
  source 1..21: mol_type = other DNA
cgtgtccagagcgaccacgtt

SEQ ID NO: 12368 - DNA, 21 bp, synthetic construct
  misc_feature 1..21: note = Synthetic
  source 1..21: mol_type = other DNA
cgtgtcctcacggccaaggta

SEQ ID NO: 12369 - DNA, 21 bp, synthetic construct
  misc_feature 1..21: note = Synthetic
  source 1..21: mol_type = other DNA
cgtgtgggggtccagctggaa

SEQ ID NO: 12370 - DNA, 21 bp, synthetic construct
  misc_feature 1..21: note = Synthetic
  source 1..21: mol_type = other DNA
cgtgttagccaggatggtctc

SEQ ID NO: 12371 - DNA, 21 bp, synthetic construct
  misc_feature 1..21: note = Synthetic
  source 1..21: mol_type = other DNA
cgttcctcaggttggggatga

SEQ ID NO: 12372 - DNA, 21 bp, synthetic construct
  misc_feature 1..21: note = Synthetic
  source 1..21: mol_type = other DNA
cgttctccctgaataacgttt

SEQ ID NO: 12373 - DNA, 21 bp, synthetic construct
  misc_feature 1..21: note = Synthetic
  source 1..21: mol_type = other DNA
cgttgacatcgatgcttgaga

SEQ ID NO: 12374 - DNA, 21 bp, synthetic construct
  misc_feature 1..21: note = Synthetic
  source 1..21: mol_type = other DNA
cgttgactcctgagtttaggg

SEQ ID NO: 12375 - DNA, 21 bp, synthetic construct
  misc_feature 1..21: note = Synthetic
  source 1..21: mol_type = other DNA
cgttgatgatatctgtccaaa

SEQ ID NO: 12376 - DNA, 21 bp, synthetic construct
  misc_feature 1..21: note = Synthetic
  source 1..21: mol_type = other DNA
cgttgcacacagtccagttcg

SEQ ID NO: 12377 - DNA, 21 bp, synthetic construct
  misc_feature 1..21: note = Synthetic
  source 1..21: mol_type = other DNA
cgttggtcccgcactctttga

SEQ ID NO: 12378 - DNA, 21 bp, synthetic construct
  misc_feature 1..21: note = Synthetic
  source 1..21: mol_type = other DNA
cgttggtgccatctgctgttg

SEQ ID NO: 12379 - DNA, 21 bp, synthetic construct
  misc_feature 1..21: note = Synthetic
  source 1..21: mol_type = other DNA
cgttgtcgcaggcccacagct

SEQ ID NO: 12380 - DNA, 21 bp, synthetic construct
  misc_feature 1..21: note = Synthetic
  source 1..21: mol_type = other DNA
cgttgtcgcagtccacttggc

SEQ ID NO: 12381 - DNA, 21 bp, synthetic construct
  misc_feature 1..21: note = Synthetic
  source 1..21: mol_type = other DNA
cgttgttgtccaagcattcgt

SEQ ID NO: 12382 - DNA, 21 bp, synthetic construct
  misc_feature 1..21: note = Synthetic
  source 1..21: mol_type = other DNA
cgtttcaacctcgtaaggaac

SEQ ID NO: 12383 - DNA, 21 bp, synthetic construct
  misc_feature 1..21: note = Synthetic
  source 1..21: mol_type = other DNA
cgtttctttcgcatctgtcgc

SEQ ID NO: 12384 - DNA, 21 bp, synthetic construct
  misc_feature 1..21: note = Synthetic
  source 1..21: mol_type = other DNA
cgttttcctcttcacgccctt

SEQ ID NO: 12385 - DNA, 21 bp, synthetic construct
  misc_feature 1..21: note = Synthetic
  source 1..21: mol_type = other DNA
ctaacctggctgtctagcaag

SEQ ID NO: 12386 - DNA, 21 bp, synthetic construct
  misc_feature 1..21: note = Synthetic
  source 1..21: mol_type = other DNA
ctaattttttgtatttttagt

SEQ ID NO: 12387 - DNA, 21 bp, synthetic construct
  misc_feature 1..21: note = Synthetic
  source 1..21: mol_type = other DNA
ctacaaaaaccttctatacag

SEQ ID NO: 12388 - DNA, 21 bp, synthetic construct
  misc_feature 1..21: note = Synthetic
  source 1..21: mol_type = other DNA
ctacacagggccccgagaata

SEQ ID NO: 12389 - DNA, 21 bp, synthetic construct
  misc_feature 1..21: note = Synthetic
  source 1..21: mol_type = other DNA
ctacagcgctgcggccactca

SEQ ID NO: 12390 - DNA, 21 bp, synthetic construct
  misc_feature 1..21: note = Synthetic
  source 1..21: mol_type = other DNA
ctacaggtgcccgccaccacg

SEQ ID NO: 12391 - DNA, 21 bp, synthetic construct
  misc_feature 1..21: note = Synthetic
  source 1..21: mol_type = other DNA
ctactgggcttcttctcattt

SEQ ID NO: 12392 - DNA, 21 bp, synthetic construct
  misc_feature 1..21: note = Synthetic
  source 1..21: mol_type = other DNA
ctactgtccccttggaacacg

SEQ ID NO: 12393 - DNA, 21 bp, synthetic construct
  misc_feature 1..21: note = Synthetic
  source 1..21: mol_type = other DNA
ctagcaaggcttgcatagaag

SEQ ID NO: 12394 - DNA, 21 bp, synthetic construct
  misc_feature 1..21: note = Synthetic
  source 1..21: mol_type = other DNA
ctagccatgttgcagactttg

SEQ ID NO: 12395 - DNA, 21 bp, synthetic construct
  misc_feature 1..21: note = Synthetic
  source 1..21: mol_type = other DNA
ctagctggaaaccctggcttc

SEQ ID NO: 12396 - DNA, 21 bp, synthetic construct
  misc_feature 1..21: note = Synthetic
  source 1..21: mol_type = other DNA
ctagggtgatgccattgggcc

SEQ ID NO: 12397 - DNA, 21 bp, synthetic construct
  misc_feature 1..21: note = Synthetic
  source 1..21: mol_type = other DNA
ctaggtgggcggacataaaga

SEQ ID NO: 12398 - DNA, 21 bp, synthetic construct
  misc_feature 1..21: note = Synthetic
  source 1..21: mol_type = other DNA
ctatacagtggtttaaaaagt

SEQ ID NO: 12399 - DNA, 21 bp, synthetic construct
  misc_feature 1..21: note = Synthetic
  source 1..21: mol_type = other DNA
ctatctccaccgtggtgagcc

SEQ ID NO: 12400 - DNA, 21 bp, synthetic construct
  misc_feature 1..21: note = Synthetic
  source 1..21: mol_type = other DNA
ctatctgtacagggacgcatt

SEQ ID NO: 12401 - DNA, 21 bp, synthetic construct
  misc_feature 1..21: note = Synthetic
  source 1..21: mol_type = other DNA
ctatgttgcccaggctggaaa

SEQ ID NO: 12402 - DNA, 21 bp, synthetic construct
  misc_feature 1..21: note = Synthetic
  source 1..21: mol_type = other DNA
ctattgctggccacctccgtg

SEQ ID NO: 12403 - DNA, 21 bp, synthetic construct
  misc_feature 1..21: note = Synthetic
  source 1..21: mol_type = other DNA
ctcaaaacttcctggagagaa

SEQ ID NO: 12404 - DNA, 21 bp, synthetic construct
  misc_feature 1..21: note = Synthetic
  source 1..21: mol_type = other DNA
ctcaaaccatcctcccacctc

SEQ ID NO: 12405 - DNA, 21 bp, synthetic construct
  misc_feature 1..21: note = Synthetic
  source 1..21: mol_type = other DNA
ctcaaagacggccaaggagaa

SEQ ID NO: 12406 - DNA, 21 bp, synthetic construct
  misc_feature 1..21: note = Synthetic
  source 1..21: mol_type = other DNA
ctcaaatgcctgagctcaaac

SEQ ID NO: 12407 - DNA, 21 bp, synthetic construct
  misc_feature 1..21: note = Synthetic
  source 1..21: mol_type = other DNA
ctcaagtgatccagctcagcc

SEQ ID NO: 12408 - DNA, 21 bp, synthetic construct
  misc_feature 1..21: note = Synthetic
  source 1..21: mol_type = other DNA
ctcacaccagttcactcctct

SEQ ID NO: 12409 - DNA, 21 bp, synthetic construct
  misc_feature 1..21: note = Synthetic
  source 1..21: mol_type = other DNA
ctcacactggcacttgtagcc

SEQ ID NO: 12410 - DNA, 21 bp, synthetic construct
  misc_feature 1..21: note = Synthetic
  source 1..21: mol_type = other DNA
ctcaccgtgcatgttttaaac

SEQ ID NO: 12411 - DNA, 21 bp, synthetic construct
  misc_feature 1..21: note = Synthetic
  source 1..21: mol_type = other DNA
ctcacgacagcctcaaatgcc

SEQ ID NO: 12412 - DNA, 21 bp, synthetic construct
  misc_feature 1..21: note = Synthetic
  source 1..21: mol_type = other DNA
ctcacgctactgggcttcttc

SEQ ID NO: 12413 - DNA, 21 bp, synthetic construct
  misc_feature 1..21: note = Synthetic
  source 1..21: mol_type = other DNA
ctcacggccaaggtaaccggg

SEQ ID NO: 12414 - DNA, 21 bp, synthetic construct
  misc_feature 1..21: note = Synthetic
  source 1..21: mol_type = other DNA
ctcactgcaacctccacctcc

SEQ ID NO: 12415 - DNA, 21 bp, synthetic construct
  misc_feature 1..21: note = Synthetic
  source 1..21: mol_type = other DNA
ctcactgcaagctccgcttcc

SEQ ID NO: 12416 - DNA, 21 bp, synthetic construct
  misc_feature 1..21: note = Synthetic
  source 1..21: mol_type = other DNA
ctcagcctcccaaagtgctgg

SEQ ID NO: 12417 - DNA, 21 bp, synthetic construct
  misc_feature 1..21: note = Synthetic
  source 1..21: mol_type = other DNA
ctcagcctcccaagtagctgg

SEQ ID NO: 12418 - DNA, 21 bp, synthetic construct
  misc_feature 1..21: note = Synthetic
  source 1..21: mol_type = other DNA
ctcagcctcccgagtagctgg

SEQ ID NO: 12419 - DNA, 21 bp, synthetic construct
  misc_feature 1..21: note = Synthetic
  source 1..21: mol_type = other DNA
ctcagcctcgccatgcctggc

SEQ ID NO: 12420 - DNA, 21 bp, synthetic construct
  misc_feature 1..21: note = Synthetic
  source 1..21: mol_type = other DNA
ctcagcctctcttggctgggt

SEQ ID NO: 12421 - DNA, 21 bp, synthetic construct
  misc_feature 1..21: note = Synthetic
  source 1..21: mol_type = other DNA
ctcagcctctgtgaggcagct

SEQ ID NO: 12422 - DNA, 21 bp, synthetic construct
  misc_feature 1..21: note = Synthetic
  source 1..21: mol_type = other DNA
ctcagcgctgccatcgcagac

SEQ ID NO: 12423 - DNA, 21 bp, synthetic construct
  misc_feature 1..21: note = Synthetic
  source 1..21: mol_type = other DNA
ctcaggaagggttctgggcag

SEQ ID NO: 12424 - DNA, 21 bp, synthetic construct
  misc_feature 1..21: note = Synthetic
  source 1..21: mol_type = other DNA
ctcaggcacttaataaatatt

SEQ ID NO: 12425 - DNA, 21 bp, synthetic construct
  misc_feature 1..21: note = Synthetic
  source 1..21: mol_type = other DNA
ctcaggcctggtctccaactc

SEQ ID NO: 12426 - DNA, 21 bp, synthetic construct
  misc_feature 1..21: note = Synthetic
  source 1..21: mol_type = other DNA
ctcaggcgatcctcctgcctc

SEQ ID NO: 12427 - DNA, 21 bp, synthetic construct
  misc_feature 1..21: note = Synthetic
  source 1..21: mol_type = other DNA
ctcaggctctgcctctgggaa

SEQ ID NO: 12428 - DNA, 21 bp, synthetic construct
  misc_feature 1..21: note = Synthetic
  source 1..21: mol_type = other DNA
ctcagggtggtcctctcacac

SEQ ID NO: 12429 - DNA, 21 bp, synthetic construct
  misc_feature 1..21: note = Synthetic
  source 1..21: mol_type = other DNA
ctcaggttggggatgaggctg

SEQ ID NO: 12430 - DNA, 21 bp, synthetic construct
  misc_feature 1..21: note = Synthetic
  source 1..21: mol_type = other DNA
ctcatacatacaacggggaca

SEQ ID NO: 12431 - DNA, 21 bp, synthetic construct
  misc_feature 1..21: note = Synthetic
  source 1..21: mol_type = other DNA
ctcatcagagccatcctggca

SEQ ID NO: 12432 - DNA, 21 bp, synthetic construct
  misc_feature 1..21: note = Synthetic
  source 1..21: mol_type = other DNA
ctcatccgagccatcttcgca

SEQ ID NO: 12433 - DNA, 21 bp, synthetic construct
  misc_feature 1..21: note = Synthetic
  source 1..21: mol_type = other DNA
ctcatcctctgtggtcttctg

SEQ ID NO: 12434 - DNA, 21 bp, synthetic construct
  misc_feature 1..21: note = Synthetic
  source 1..21: mol_type = other DNA
ctcatcgatatcgcactcttt

SEQ ID NO: 12435 - DNA, 21 bp, synthetic construct
  misc_feature 1..21: note = Synthetic
  source 1..21: mol_type = other DNA
ctcatcgatatcttcgcatct

SEQ ID NO: 12436 - DNA, 21 bp, synthetic construct
  misc_feature 1..21: note = Synthetic
  source 1..21: mol_type = other DNA
ctcatgatccacccgcctcgg

SEQ ID NO: 12437 - DNA, 21 bp, synthetic construct
  misc_feature 1..21: note = Synthetic
  source 1..21: mol_type = other DNA
ctcatgtccctggccagcagc

SEQ ID NO: 12438 - DNA, 21 bp, synthetic construct
  misc_feature 1..21: note = Synthetic
  source 1..21: mol_type = other DNA
ctcatgtccttgcagtcatat

SEQ ID NO: 12439 - DNA, 21 bp, synthetic construct
  misc_feature 1..21: note = Synthetic
  source 1..21: mol_type = other DNA
ctcatttcctctgccagcaac

SEQ ID NO: 12440 - DNA, 21 bp, synthetic construct
  misc_feature 1..21: note = Synthetic
  source 1..21: mol_type = other DNA
ctccaactcctgaactcaagt

SEQ ID NO: 12441 - DNA, 21 bp, synthetic construct
  misc_feature 1..21: note = Synthetic
  source 1..21: mol_type = other DNA
ctccaagatggtcttccggtt

SEQ ID NO: 12442 - DNA, 21 bp, synthetic construct
  misc_feature 1..21: note = Synthetic
  source 1..21: mol_type = other DNA
ctccaccgtggtgagcccagg

SEQ ID NO: 12443 - DNA, 21 bp, synthetic construct
  misc_feature 1..21: note = Synthetic
  source 1..21: mol_type = other DNA
ctccacctcctgggctcaggc

SEQ ID NO: 12444 - DNA, 21 bp, synthetic construct
  misc_feature 1..21: note = Synthetic
  source 1..21: mol_type = other DNA
ctccagaactgaggaatgcag

SEQ ID NO: 12445 - DNA, 21 bp, synthetic construct
  misc_feature 1..21: note = Synthetic
  source 1..21: mol_type = other DNA
ctccagactgaccatcgaggg

SEQ ID NO: 12446 - DNA, 21 bp, synthetic construct
  misc_feature 1..21: note = Synthetic
  source 1..21: mol_type = other DNA
ctccagactgaccatctgtct

SEQ ID NO: 12447 - DNA, 21 bp, synthetic construct
  misc_feature 1..21: note = Synthetic
  source 1..21: mol_type = other DNA
ctccaggcagatgttcacgcc

SEQ ID NO: 12448 - DNA, 21 bp, synthetic construct
  misc_feature 1..21: note = Synthetic
  source 1..21: mol_type = other DNA
ctccaggttcacgcagagctg

SEQ ID NO: 12449 - DNA, 21 bp, synthetic construct
  misc_feature 1..21: note = Synthetic
  source 1..21: mol_type = other DNA
ctcccaaaaagcgttgcacac

SEQ ID NO: 12450 - DNA, 21 bp, synthetic construct
  misc_feature 1..21: note = Synthetic
  source 1..21: mol_type = other DNA
ctcccaaagtgctgggattac

SEQ ID NO: 12451 - DNA, 21 bp, synthetic construct
  misc_feature 1..21: note = Synthetic
  source 1..21: mol_type = other DNA
ctcccaagtagctgggatcac

SEQ ID NO: 12452 - DNA, 21 bp, synthetic construct
  misc_feature 1..21: note = Synthetic
  source 1..21: mol_type = other DNA
ctcccacctcagcctcgccat

SEQ ID NO: 12453 - DNA, 21 bp, synthetic construct
  misc_feature 1..21: note = Synthetic
  source 1..21: mol_type = other DNA
ctcccagaagccactcataca

SEQ ID NO: 12454 - DNA, 21 bp, synthetic construct
  misc_feature 1..21: note = Synthetic
  source 1..21: mol_type = other DNA
ctcccagatgaataaatatat

SEQ ID NO: 12455 - DNA, 21 bp, synthetic construct
  misc_feature 1..21: note = Synthetic
  source 1..21: mol_type = other DNA
ctcccctttcatcttccatgt

SEQ ID NO: 12456 - DNA, 21 bp, synthetic construct
  misc_feature 1..21: note = Synthetic
  source 1..21: mol_type = other DNA
ctcccgagtagctgggactac

SEQ ID NO: 12457 - DNA, 21 bp, synthetic construct
  misc_feature 1..21: note = Synthetic
  source 1..21: mol_type = other DNA
ctccctgaataacgttttcct

SEQ ID NO: 12458 - DNA, 21 bp, synthetic construct
  misc_feature 1..21: note = Synthetic
  source 1..21: mol_type = other DNA
ctccgaaaccagaaaggctta

SEQ ID NO: 12459 - DNA, 21 bp, synthetic construct
  misc_feature 1..21: note = Synthetic
  source 1..21: mol_type = other DNA
ctccgcttcccgggttcacac

SEQ ID NO: 12460 - DNA, 21 bp, synthetic construct
  misc_feature 1..21: note = Synthetic
  source 1..21: mol_type = other DNA
ctccggacatcagtgcaacag

SEQ ID NO: 12461 - DNA, 21 bp, synthetic construct
  misc_feature 1..21: note = Synthetic
  source 1..21: mol_type = other DNA
ctccggggacccgggacttgt

SEQ ID NO: 12462 - DNA, 21 bp, synthetic construct
  misc_feature 1..21: note = Synthetic
  source 1..21: mol_type = other DNA
ctccggtccagcgtcatcttc

SEQ ID NO: 12463 - DNA, 21 bp, synthetic construct
  misc_feature 1..21: note = Synthetic
  source 1..21: mol_type = other DNA
ctccgtggcgatggggaggac

SEQ ID NO: 12464 - DNA, 21 bp, synthetic construct
  misc_feature 1..21: note = Synthetic
  source 1..21: mol_type = other DNA
ctccgtgtccagagcgaccac

SEQ ID NO: 12465 - DNA, 21 bp, synthetic construct
  misc_feature 1..21: note = Synthetic
  source 1..21: mol_type = other DNA
ctcctcatgtccctggccagc

SEQ ID NO: 12466 - DNA, 21 bp, synthetic construct
  misc_feature 1..21: note = Synthetic
  source 1..21: mol_type = other DNA
ctcctcttggctgggtgaggt

SEQ ID NO: 12467 - DNA, 21 bp, synthetic construct
  misc_feature 1..21: note = Synthetic
  source 1..21: mol_type = other DNA
ctcctgaactcaagtgatcca

SEQ ID NO: 12468 - DNA, 21 bp, synthetic construct
  misc_feature 1..21: note = Synthetic
  source 1..21: mol_type = other DNA
ctcctgacctcatgatccacc

SEQ ID NO: 12469 - DNA, 21 bp, synthetic construct
  misc_feature 1..21: note = Synthetic
  source 1..21: mol_type = other DNA
ctcctgagtttaggggtttgg

SEQ ID NO: 12470 - DNA, 21 bp, synthetic construct
  misc_feature 1..21: note = Synthetic
  source 1..21: mol_type = other DNA
ctcctgcctcagcctcccaag

SEQ ID NO: 12471 - DNA, 21 bp, synthetic construct
  misc_feature 1..21: note = Synthetic
  source 1..21: mol_type = other DNA
ctcctgcctcagcctcccgag

SEQ ID NO: 12472 - DNA, 21 bp, synthetic construct
  misc_feature 1..21: note = Synthetic
  source 1..21: mol_type = other DNA
ctcctgggactcatcagagcc

SEQ ID NO: 12473 - DNA, 21 bp, synthetic construct
  misc_feature 1..21: note = Synthetic
  source 1..21: mol_type = other DNA
ctcctgggctcaggcgatcct

SEQ ID NO: 12474 - DNA, 21 bp, synthetic construct
  misc_feature 1..21: note = Synthetic
  source 1..21: mol_type = other DNA
ctcctgggtggccactgcagc

SEQ ID NO: 12475 - DNA, 21 bp, synthetic construct
  misc_feature 1..21: note = Synthetic
  source 1..21: mol_type = other DNA
ctcgaaagacactgggtgggt

SEQ ID NO: 12476 - DNA, 21 bp, synthetic construct
  misc_feature 1..21: note = Synthetic
  source 1..21: mol_type = other DNA
ctcgaaggccgagcaggggct

SEQ ID NO: 12477 - DNA, 21 bp, synthetic construct
  misc_feature 1..21: note = Synthetic
  source 1..21: mol_type = other DNA
ctcgaggggtagctgtagccg

SEQ ID NO: 12478 - DNA, 21 bp, synthetic construct
  misc_feature 1..21: note = Synthetic
  source 1..21: mol_type = other DNA
ctcgatattcacgatcacggc

SEQ ID NO: 12479 - DNA, 21 bp, synthetic construct
  misc_feature 1..21: note = Synthetic
  source 1..21: mol_type = other DNA
ctcgatcatggctcactgcaa

SEQ ID NO: 12480 - DNA, 21 bp, synthetic construct
  misc_feature 1..21: note = Synthetic
  source 1..21: mol_type = other DNA
ctcgatctcctgacctcatga

SEQ ID NO: 12481 - DNA, 21 bp, synthetic construct
  misc_feature 1..21: note = Synthetic
  source 1..21: mol_type = other DNA
ctcgcagagtgtcacattaac

SEQ ID NO: 12482 - DNA, 21 bp, synthetic construct
  misc_feature 1..21: note = Synthetic
  source 1..21: mol_type = other DNA
ctcgcagagtgtcagacagcc

SEQ ID NO: 12483 - DNA, 21 bp, synthetic construct
  misc_feature 1..21: note = Synthetic
  source 1..21: mol_type = other DNA
ctcgcagcctctgccaggcag

SEQ ID NO: 12484 - DNA, 21 bp, synthetic construct
  misc_feature 1..21: note = Synthetic
  source 1..21: mol_type = other DNA
ctcgccacttaggcagtggaa

SEQ ID NO: 12485 - DNA, 21 bp, synthetic construct
  misc_feature 1..21: note = Synthetic
  source 1..21: mol_type = other DNA
ctcgccatgcctggccagagg

SEQ ID NO: 12486 - DNA, 21 bp, synthetic construct
  misc_feature 1..21: note = Synthetic
  source 1..21: mol_type = other DNA
ctcgctccggtccagcgtcat

SEQ ID NO: 12487 - DNA, 21 bp, synthetic construct
  misc_feature 1..21: note = Synthetic
  source 1..21: mol_type = other DNA
ctcgctctgtcgcccaggcca

SEQ ID NO: 12488 - DNA, 21 bp, synthetic construct
  misc_feature 1..21: note = Synthetic
  source 1..21: mol_type = other DNA
ctcgctttgttgctcaggcct

SEQ ID NO: 12489 - DNA, 21 bp, synthetic construct
  misc_feature 1..21: note = Synthetic
  source 1..21: mol_type = other DNA
ctcggcctcccaaagtgctgg

SEQ ID NO: 12490 - DNA, 21 bp, synthetic construct
  misc_feature 1..21: note = Synthetic
  source 1..21: mol_type = other DNA
ctcggctcactgcaagctccg

SEQ ID NO: 12491 - DNA, 21 bp, synthetic construct
  misc_feature 1..21: note = Synthetic
  source 1..21: mol_type = other DNA
ctcggctgcagaccaaggagg

SEQ ID NO: 12492 - DNA, 21 bp, synthetic construct
  misc_feature 1..21: note = Synthetic
  source 1..21: mol_type = other DNA
ctcggtgccaccacggattca

SEQ ID NO: 12493 - DNA, 21 bp, synthetic construct
  misc_feature 1..21: note = Synthetic
  source 1..21: mol_type = other DNA
ctcgtaaggaaccgaggcctt

SEQ ID NO: 12494 - DNA, 21 bp, synthetic construct
  misc_feature 1..21: note = Synthetic
  source 1..21: mol_type = other DNA
ctcgtagccgatcttaaggtc

SEQ ID NO: 12495 - DNA, 21 bp, synthetic construct
  misc_feature 1..21: note = Synthetic
  source 1..21: mol_type = other DNA
ctcgtcagatttgtccttgca

SEQ ID NO: 12496 - DNA, 21 bp, synthetic construct
  misc_feature 1..21: note = Synthetic
  source 1..21: mol_type = other DNA
ctcgtcctgggagcacgtctt

SEQ ID NO: 12497 - DNA, 21 bp, synthetic construct
  misc_feature 1..21: note = Synthetic
  source 1..21: mol_type = other DNA
ctcgtctgagccgtccaagca

SEQ ID NO: 12498 - DNA, 21 bp, synthetic construct
  misc_feature 1..21: note = Synthetic
  source 1..21: mol_type = other DNA
ctcgtctgagccgttgtcgca

SEQ ID NO: 12499 - DNA, 21 bp, synthetic construct
  misc_feature 1..21: note = Synthetic
  source 1..21: mol_type = other DNA
ctcgtgccggttggtgaagaa

SEQ ID NO: 12500 - DNA, 21 bp, synthetic construct
  misc_feature 1..21: note = Synthetic
  source 1..21: mol_type = other DNA
ctcgtgtatgtcgcggaggcg

SEQ ID NO: 12501 - DNA, 21 bp, synthetic construct
  misc_feature 1..21: note = Synthetic
  source 1..21: mol_type = other DNA
ctcgtttctttcgcatctgtc

SEQ ID NO: 12502 - DNA, 21 bp, synthetic construct
  misc_feature 1..21: note = Synthetic
  source 1..21: mol_type = other DNA
ctctagccatgttgcagactt

SEQ ID NO: 12503 - DNA, 21 bp, synthetic construct
  misc_feature 1..21: note = Synthetic
  source 1..21: mol_type = other DNA
ctctcacaccagttcactcct

SEQ ID NO: 12504 - DNA, 21 bp, synthetic construct
  misc_feature 1..21: note = Synthetic
  source 1..21: mol_type = other DNA
ctctccggacatcagtgcaac

SEQ ID NO: 12505 - DNA, 21 bp, synthetic construct
  misc_feature 1..21: note = Synthetic
  source 1..21: mol_type = other DNA
ctctctgtccccggcattcat

SEQ ID NO: 12506 - DNA, 21 bp, synthetic construct
  misc_feature 1..21: note = Synthetic
  source 1..21: mol_type = other DNA
ctctcttggctgggtgaggtt

SEQ ID NO: 12507 - DNA, 21 bp, synthetic construct
  misc_feature 1..21: note = Synthetic
  source 1..21: mol_type = other DNA
ctctgaactgagaaagtgcaa

SEQ ID NO: 12508 - DNA, 21 bp, synthetic construct
  misc_feature 1..21: note = Synthetic
  source 1..21: mol_type = other DNA
ctctgccagcaacgtcgccca

SEQ ID NO: 12509 - DNA, 21 bp, synthetic construct
  misc_feature 1..21: note = Synthetic
  source 1..21: mol_type = other DNA
ctctgccaggcagtgtcccga

SEQ ID NO: 12510 - DNA, 21 bp, synthetic construct
  misc_feature 1..21: note = Synthetic
  source 1..21: mol_type = other DNA
ctctgcctctgggaagtggca

SEQ ID NO: 12511 - DNA, 21 bp, synthetic construct
  misc_feature 1..21: note = Synthetic
  source 1..21: mol_type = other DNA
ctctgctgatgacggtgtcat

SEQ ID NO: 12512 - DNA, 21 bp, synthetic construct
  misc_feature 1..21: note = Synthetic
  source 1..21: mol_type = other DNA
ctctggcaggcaatgctttgg

SEQ ID NO: 12513 - DNA, 21 bp, synthetic construct
  misc_feature 1..21: note = Synthetic
  source 1..21: mol_type = other DNA
ctctgggaagtggcatcattt

SEQ ID NO: 12514 - DNA, 21 bp, synthetic construct
  misc_feature 1..21: note = Synthetic
  source 1..21: mol_type = other DNA
ctctgggacaggtcagaccag

SEQ ID NO: 12515 - DNA, 21 bp, synthetic construct
  misc_feature 1..21: note = Synthetic
  source 1..21: mol_type = other DNA
ctctgggcctgacatcccctc

SEQ ID NO: 12516 - DNA, 21 bp, synthetic construct
  misc_feature 1..21: note = Synthetic
  source 1..21: mol_type = other DNA
ctctggggacagtaggttttc

SEQ ID NO: 12517 - DNA, 21 bp, synthetic construct
  misc_feature 1..21: note = Synthetic
  source 1..21: mol_type = other DNA
ctctgtcaagctgggtgctgc

SEQ ID NO: 12518 - DNA, 21 bp, synthetic construct
  misc_feature 1..21: note = Synthetic
  source 1..21: mol_type = other DNA
ctctgtcacacagctgccccc

SEQ ID NO: 12519 - DNA, 21 bp, synthetic construct
  misc_feature 1..21: note = Synthetic
  source 1..21: mol_type = other DNA
ctctgtccccggcattcattg

SEQ ID NO: 12520 - DNA, 21 bp, synthetic construct
  misc_feature 1..21: note = Synthetic
  source 1..21: mol_type = other DNA
ctctgtcgcccaggccagact

SEQ ID NO: 12521 - DNA, 21 bp, synthetic construct
  misc_feature 1..21: note = Synthetic
  source 1..21: mol_type = other DNA
ctctgtctttgaataaaacaa

SEQ ID NO: 12522 - DNA, 21 bp, synthetic construct
  misc_feature 1..21: note = Synthetic
  source 1..21: mol_type = other DNA
ctctgtgaacttgatcggggc

SEQ ID NO: 12523 - DNA, 21 bp, synthetic construct
  misc_feature 1..21: note = Synthetic
  source 1..21: mol_type = other DNA
ctctgtgaggcagctcctcat

SEQ ID NO: 12524 - DNA, 21 bp, synthetic construct
  misc_feature 1..21: note = Synthetic
  source 1..21: mol_type = other DNA
ctctgtggtcttctgatagac

SEQ ID NO: 12525 - DNA, 21 bp, synthetic construct
  misc_feature 1..21: note = Synthetic
  source 1..21: mol_type = other DNA
ctcttatccttcacgaggaaa

SEQ ID NO: 12526 - DNA, 21 bp, synthetic construct
  misc_feature 1..21: note = Synthetic
  source 1..21: mol_type = other DNA
ctcttcacgcccttggtatcc

SEQ ID NO: 12527 - DNA, 21 bp, synthetic construct
  misc_feature 1..21: note = Synthetic
  source 1..21: mol_type = other DNA
ctcttggctgggtgaggttgt

SEQ ID NO: 12528 - DNA, 21 bp, synthetic construct
  misc_feature 1..21: note = Synthetic
  source 1..21: mol_type = other DNA
ctctttgatgggttcatctga

SEQ ID NO: 12529 - DNA, 21 bp, synthetic construct
  misc_feature 1..21: note = Synthetic
  source 1..21: mol_type = other DNA
ctcttttcatcctccaagatg

SEQ ID NO: 12530 - DNA, 21 bp, synthetic construct
  misc_feature 1..21: note = Synthetic
  source 1..21: mol_type = other DNA
ctgaaaatggcttcgttgatg

SEQ ID NO: 12531 - DNA, 21 bp, synthetic construct
  misc_feature 1..21: note = Synthetic
  source 1..21: mol_type = other DNA
ctgaaatagggtcttcatctg

SEQ ID NO: 12532 - DNA, 21 bp, synthetic construct
  misc_feature 1..21: note = Synthetic
  source 1..21: mol_type = other DNA
ctgaacaaatacagcaaccag

SEQ ID NO: 12533 - DNA, 21 bp, synthetic construct
  misc_feature 1..21: note = Synthetic
  source 1..21: mol_type = other DNA
ctgaactcaagtgatccagct

SEQ ID NO: 12534 - DNA, 21 bp, synthetic construct
  misc_feature 1..21: note = Synthetic
  source 1..21: mol_type = other DNA
ctgaactgagaaagtgcaagg

SEQ ID NO: 12535 - DNA, 21 bp, synthetic construct
  misc_feature 1..21: note = Synthetic
  source 1..21: mol_type = other DNA
ctgaagatctcggctgcagac

SEQ ID NO: 12536 - DNA, 21 bp, synthetic construct
  misc_feature 1..21: note = Synthetic
  source 1..21: mol_type = other DNA
ctgaagtccccggatttgcag

SEQ ID NO: 12537 - DNA, 21 bp, synthetic construct
  misc_feature 1..21: note = Synthetic
  source 1..21: mol_type = other DNA
ctgaagtcccgtcaaacgatc

SEQ ID NO: 12538 - DNA, 21 bp, synthetic construct
  misc_feature 1..21: note = Synthetic
  source 1..21: mol_type = other DNA
ctgaataacgttttcctcttc

SEQ ID NO: 12539 - DNA, 21 bp, synthetic construct
  misc_feature 1..21: note = Synthetic
  source 1..21: mol_type = other DNA
ctgaatgttttcagtcaccag

SEQ ID NO: 12540 - DNA, 21 bp, synthetic construct
  misc_feature 1..21: note = Synthetic
  source 1..21: mol_type = other DNA
ctgacactcatcgatatcgca

SEQ ID NO: 12541 - DNA, 21 bp, synthetic construct
  misc_feature 1..21: note = Synthetic
  source 1..21: mol_type = other DNA
ctgacactcatcgatatcttc

SEQ ID NO: 12542 - DNA, 21 bp, synthetic construct
  misc_feature 1..21: note = Synthetic
  source 1..21: mol_type = other DNA
ctgacagccacacctgggtgc

SEQ ID NO: 12543 - DNA, 21 bp, synthetic construct
  misc_feature 1..21: note = Synthetic
  source 1..21: mol_type = other DNA
ctgacatcccctcccctttca

SEQ ID NO: 12544 - DNA, 21 bp, synthetic construct
  misc_feature 1..21: note = Synthetic
  source 1..21: mol_type = other DNA
ctgaccagtcccggcagtctc

SEQ ID NO: 12545 - DNA, 21 bp, synthetic construct
  misc_feature 1..21: note = Synthetic
  source 1..21: mol_type = other DNA
ctgaccatcgaggggtagctg

SEQ ID NO: 12546 - DNA, 21 bp, synthetic construct
  misc_feature 1..21: note = Synthetic
  source 1..21: mol_type = other DNA
ctgaccatctgtctcgagggg

SEQ ID NO: 12547 - DNA, 21 bp, synthetic construct
  misc_feature 1..21: note = Synthetic
  source 1..21: mol_type = other DNA
ctgacctcatgatccacccgc

SEQ ID NO: 12548 - DNA, 21 bp, synthetic construct
  misc_feature 1..21: note = Synthetic
  source 1..21: mol_type = other DNA
ctgacctcgtgccggttggtg

SEQ ID NO: 12549 - DNA, 21 bp, synthetic construct
  misc_feature 1..21: note = Synthetic
  source 1..21: mol_type = other DNA
ctgacctttagcctgacggtg

SEQ ID NO: 12550 - DNA, 21 bp, synthetic construct
  misc_feature 1..21: note = Synthetic
  source 1..21: mol_type = other DNA
ctgacggaggctgtcactgtc

SEQ ID NO: 12551 - DNA, 21 bp, synthetic construct
  misc_feature 1..21: note = Synthetic
  source 1..21: mol_type = other DNA
ctgacggtggatgtctcctgg

SEQ ID NO: 12552 - DNA, 21 bp, synthetic construct
  misc_feature 1..21: note = Synthetic
  source 1..21: mol_type = other DNA
ctgagaaagtgcaaggagacc

SEQ ID NO: 12553 - DNA, 21 bp, synthetic construct
  misc_feature 1..21: note = Synthetic
  source 1..21: mol_type = other DNA
ctgagccgtccaagcagtccc

SEQ ID NO: 12554 - DNA, 21 bp, synthetic construct
  misc_feature 1..21: note = Synthetic
  source 1..21: mol_type = other DNA
ctgagccgttgtcgcagtcca

SEQ ID NO: 12555 - DNA, 21 bp, synthetic construct
  misc_feature 1..21: note = Synthetic
  source 1..21: mol_type = other DNA
ctgagctcaaaccatcctccc

SEQ ID NO: 12556 - DNA, 21 bp, synthetic construct
  misc_feature 1..21: note = Synthetic
  source 1..21: mol_type = other DNA
ctgaggaatgcagcggttgac

SEQ ID NO: 12557 - DNA, 21 bp, synthetic construct
  misc_feature 1..21: note = Synthetic
  source 1..21: mol_type = other DNA
ctgaggagatctagggtgatg

SEQ ID NO: 12558 - DNA, 21 bp, synthetic construct
  misc_feature 1..21: note = Synthetic
  source 1..21: mol_type = other DNA
ctgaggcaacgtttcaacctc

SEQ ID NO: 12559 - DNA, 21 bp, synthetic construct
  misc_feature 1..21: note = Synthetic
  source 1..21: mol_type = other DNA
ctgagtcacagacgaactgcc

SEQ ID NO: 12560 - DNA, 21 bp, synthetic construct
  misc_feature 1..21: note = Synthetic
  source 1..21: mol_type = other DNA
ctgagtttaggggtttggctt

SEQ ID NO: 12561 - DNA, 21 bp, synthetic construct
  misc_feature 1..21: note = Synthetic
  source 1..21: mol_type = other DNA
ctgatagacggggttgtcaaa

SEQ ID NO: 12562 - DNA, 21 bp, synthetic construct
  misc_feature 1..21: note = Synthetic
  source 1..21: mol_type = other DNA
ctgatgacggtgtcataggaa

SEQ ID NO: 12563 - DNA, 21 bp, synthetic construct
  misc_feature 1..21: note = Synthetic
  source 1..21: mol_type = other DNA
ctgatgcaccatgcatggttt

SEQ ID NO: 12564 - DNA, 21 bp, synthetic construct
  misc_feature 1..21: note = Synthetic
  source 1..21: mol_type = other DNA
ctgatttttaactttttggtt

SEQ ID NO: 12565 - DNA, 21 bp, synthetic construct
  misc_feature 1..21: note = Synthetic
  source 1..21: mol_type = other DNA
ctgcaacctccacctcctggg

SEQ ID NO: 12566 - DNA, 21 bp, synthetic construct
  misc_feature 1..21: note = Synthetic
  source 1..21: mol_type = other DNA
ctgcaagctccgcttcccggg

SEQ ID NO: 12567 - DNA, 21 bp, synthetic construct
  misc_feature 1..21: note = Synthetic
  source 1..21: mol_type = other DNA
ctgcactgggggggacacagt

SEQ ID NO: 12568 - DNA, 21 bp, synthetic construct
  misc_feature 1..21: note = Synthetic
  source 1..21: mol_type = other DNA
ctgcagaccaaggaggggcgg

SEQ ID NO: 12569 - DNA, 21 bp, synthetic construct
  misc_feature 1..21: note = Synthetic
  source 1..21: mol_type = other DNA
ctgcagatcattctctgggac

SEQ ID NO: 12570 - DNA, 21 bp, synthetic construct
  misc_feature 1..21: note = Synthetic
  source 1..21: mol_type = other DNA
ctgcagcctcagcctctcttg

SEQ ID NO: 12571 - DNA, 21 bp, synthetic construct
  misc_feature 1..21: note = Synthetic
  source 1..21: mol_type = other DNA
ctgcagcctcagcctctgtga

SEQ ID NO: 12572 - DNA, 21 bp, synthetic construct
  misc_feature 1..21: note = Synthetic
  source 1..21: mol_type = other DNA
ctgcaggtgtcgggatcctga

SEQ ID NO: 12573 - DNA, 21 bp, synthetic construct
  misc_feature 1..21: note = Synthetic
  source 1..21: mol_type = other DNA
ctgcagtccccgccgcggcga

SEQ ID NO: 12574 - DNA, 21 bp, synthetic construct
  misc_feature 1..21: note = Synthetic
  source 1..21: mol_type = other DNA
ctgcagtggcgcaatctcggc

SEQ ID NO: 12575 - DNA, 21 bp, synthetic construct
  misc_feature 1..21: note = Synthetic
  source 1..21: mol_type = other DNA
ctgccagcaacgtcgcccaga

SEQ ID NO: 12576 - DNA, 21 bp, synthetic construct
  misc_feature 1..21: note = Synthetic
  source 1..21: mol_type = other DNA
ctgccaggcagtgtcccgacc

SEQ ID NO: 12577 - DNA, 21 bp, synthetic construct
  misc_feature 1..21: note = Synthetic
  source 1..21: mol_type = other DNA
ctgccatcgcagacccacttg

SEQ ID NO: 12578 - DNA, 21 bp, synthetic construct
  misc_feature 1..21: note = Synthetic
  source 1..21: mol_type = other DNA
ctgccatggatgcagtttcca

SEQ ID NO: 12579 - DNA, 21 bp, synthetic construct
  misc_feature 1..21: note = Synthetic
  source 1..21: mol_type = other DNA
ctgcccccgagaccagagacc

SEQ ID NO: 12580 - DNA, 21 bp, synthetic construct
  misc_feature 1..21: note = Synthetic
  source 1..21: mol_type = other DNA
ctgcccctctctgtccccggc

SEQ ID NO: 12581 - DNA, 21 bp, synthetic construct
  misc_feature 1..21: note = Synthetic
  source 1..21: mol_type = other DNA
ctgccgagagatgcacttccc

SEQ ID NO: 12582 - DNA, 21 bp, synthetic construct
  misc_feature 1..21: note = Synthetic
  source 1..21: mol_type = other DNA
ctgccggctgccatggatgca

SEQ ID NO: 12583 - DNA, 21 bp, synthetic construct
  misc_feature 1..21: note = Synthetic
  source 1..21: mol_type = other DNA
ctgcctcagcctcccaagtag

SEQ ID NO: 12584 - DNA, 21 bp, synthetic construct
  misc_feature 1..21: note = Synthetic
  source 1..21: mol_type = other DNA
ctgcctcagcctcccgagtag

SEQ ID NO: 12585 - DNA, 21 bp, synthetic construct
  misc_feature 1..21: note = Synthetic
  source 1..21: mol_type = other DNA
ctgcctcccagatgaataaat

SEQ ID NO: 12586 - DNA, 21 bp, synthetic construct
  misc_feature 1..21: note = Synthetic
  source 1..21: mol_type = other DNA
ctgcctctgggaagtggcatc

SEQ ID NO: 12587 - DNA, 21 bp, synthetic construct
  misc_feature 1..21: note = Synthetic
  source 1..21: mol_type = other DNA
ctgcgcccggcctcaccgtgc

SEQ ID NO: 12588 - DNA, 21 bp, synthetic construct
  misc_feature 1..21: note = Synthetic
  source 1..21: mol_type = other DNA
ctgcggactgcagtggcgcaa

SEQ ID NO: 12589 - DNA, 21 bp, synthetic construct
  misc_feature 1..21: note = Synthetic
  source 1..21: mol_type = other DNA
ctgcggccactcatccgagcc

SEQ ID NO: 12590 - DNA, 21 bp, synthetic construct
  misc_feature 1..21: note = Synthetic
  source 1..21: mol_type = other DNA
ctgcggggcagggaggcacag

SEQ ID NO: 12591 - DNA, 21 bp, synthetic construct
  misc_feature 1..21: note = Synthetic
  source 1..21: mol_type = other DNA
ctgctgatgacggtgtcatag

SEQ ID NO: 12592 - DNA, 21 bp, synthetic construct
  misc_feature 1..21: note = Synthetic
  source 1..21: mol_type = other DNA
ctgctgatgcaccatgcatgg

SEQ ID NO: 12593 - DNA, 21 bp, synthetic construct
  misc_feature 1..21: note = Synthetic
  source 1..21: mol_type = other DNA
ctgctgtgtcctagctggaaa

SEQ ID NO: 12594 - DNA, 21 bp, synthetic construct
  misc_feature 1..21: note = Synthetic
  source 1..21: mol_type = other DNA
ctgctgttgtgtgttgaaagc

SEQ ID NO: 12595 - DNA, 21 bp, synthetic construct
  misc_feature 1..21: note = Synthetic
  source 1..21: mol_type = other DNA
ctggaaaccctggcttcccgc

SEQ ID NO: 12596 - DNA, 21 bp, synthetic construct
  misc_feature 1..21: note = Synthetic
  source 1..21: mol_type = other DNA
ctggaaagcagtggcataatc

SEQ ID NO: 12597 - DNA, 21 bp, synthetic construct
  misc_feature 1..21: note = Synthetic
  source 1..21: mol_type = other DNA
ctggaactcgtttctttcgca

SEQ ID NO: 12598 - DNA, 21 bp, synthetic construct
  misc_feature 1..21: note = Synthetic
  source 1..21: mol_type = other DNA
ctggaagccgtcggggcacag

SEQ ID NO: 12599 - DNA, 21 bp, synthetic construct
  misc_feature 1..21: note = Synthetic
  source 1..21: mol_type = other DNA
ctggaagccttcctcacactg

SEQ ID NO: 12600 - DNA, 21 bp, synthetic construct
  misc_feature 1..21: note = Synthetic
  source 1..21: mol_type = other DNA
ctggaagctggcgggaccaca

SEQ ID NO: 12601 - DNA, 21 bp, synthetic construct
  misc_feature 1..21: note = Synthetic
  source 1..21: mol_type = other DNA
ctggaattcgtcagggcgaca

SEQ ID NO: 12602 - DNA, 21 bp, synthetic construct
  misc_feature 1..21: note = Synthetic
  source 1..21: mol_type = other DNA
ctggagagaaatggaggtgtc

SEQ ID NO: 12603 - DNA, 21 bp, synthetic construct
  misc_feature 1..21: note = Synthetic
  source 1..21: mol_type = other DNA
ctggaggatttatttattttt

SEQ ID NO: 12604 - DNA, 21 bp, synthetic construct
  misc_feature 1..21: note = Synthetic
  source 1..21: mol_type = other DNA
ctggagtgcagtggctcgatc

SEQ ID NO: 12605 - DNA, 21 bp, synthetic construct
  misc_feature 1..21: note = Synthetic
  source 1..21: mol_type = other DNA
ctggagtggatgcactcgcca

SEQ ID NO: 12606 - DNA, 21 bp, synthetic construct
  misc_feature 1..21: note = Synthetic
  source 1..21: mol_type = other DNA
ctggatgtctctgctgatgac

SEQ ID NO: 12607 - DNA, 21 bp, synthetic construct
  misc_feature 1..21: note = Synthetic
  source 1..21: mol_type = other DNA
ctggcactcagcgctgccatc

SEQ ID NO: 12608 - DNA, 21 bp, synthetic construct
  misc_feature 1..21: note = Synthetic
  source 1..21: mol_type = other DNA
ctggcacttgtagccaccctc

SEQ ID NO: 12609 - DNA, 21 bp, synthetic construct
  misc_feature 1..21: note = Synthetic
  source 1..21: mol_type = other DNA
ctggcagccgccattgctcag

SEQ ID NO: 12610 - DNA, 21 bp, synthetic construct
  misc_feature 1..21: note = Synthetic
  source 1..21: mol_type = other DNA
ctggcaggcaatgctttggtc

SEQ ID NO: 12611 - DNA, 21 bp, synthetic construct
  misc_feature 1..21: note = Synthetic
  source 1..21: mol_type = other DNA
ctggccaaattcattttttaa

SEQ ID NO: 12612 - DNA, 21 bp, synthetic construct
  misc_feature 1..21: note = Synthetic
  source 1..21: mol_type = other DNA
ctggccacctccgtgtccaga

SEQ ID NO: 12613 - DNA, 21 bp, synthetic construct
  misc_feature 1..21: note = Synthetic
  source 1..21: mol_type = other DNA
ctggccagaggccatgggctg

SEQ ID NO: 12614 - DNA, 21 bp, synthetic construct
  misc_feature 1..21: note = Synthetic
  source 1..21: mol_type = other DNA
ctggccagcagcatgccgtcc

SEQ ID NO: 12615 - DNA, 21 bp, synthetic construct
  misc_feature 1..21: note = Synthetic
  source 1..21: mol_type = other DNA
ctggcctgggatcccatccca

SEQ ID NO: 12616 - DNA, 21 bp, synthetic construct
  misc_feature 1..21: note = Synthetic
  source 1..21: mol_type = other DNA
ctggcgggaccacaggtgagc

SEQ ID NO: 12617 - DNA, 21 bp, synthetic construct
  misc_feature 1..21: note = Synthetic
  source 1..21: mol_type = other DNA
ctggctgcaggtgtcgggatc

SEQ ID NO: 12618 - DNA, 21 bp, synthetic construct
  misc_feature 1..21: note = Synthetic
  source 1..21: mol_type = other DNA
ctggctgtctagcaaggcttg

SEQ ID NO: 12619 - DNA, 21 bp, synthetic construct
  misc_feature 1..21: note = Synthetic
  source 1..21: mol_type = other DNA
ctggcttaaggaaggtacaaa

SEQ ID NO: 12620 - DNA, 21 bp, synthetic construct
  misc_feature 1..21: note = Synthetic
  source 1..21: mol_type = other DNA
ctggcttcccgcgattgcact

SEQ ID NO: 12621 - DNA, 21 bp, synthetic construct
  misc_feature 1..21: note = Synthetic
  source 1..21: mol_type = other DNA
ctgggaagtggcatcatttgg

SEQ ID NO: 12622 - DNA, 21 bp, synthetic construct
  misc_feature 1..21: note = Synthetic
  source 1..21: mol_type = other DNA
ctgggacaggtcagaccagta

SEQ ID NO: 12623 - DNA, 21 bp, synthetic construct
  misc_feature 1..21: note = Synthetic
  source 1..21: mol_type = other DNA
ctgggactacaggtgcccgcc

SEQ ID NO: 12624 - DNA, 21 bp, synthetic construct
  misc_feature 1..21: note = Synthetic
  source 1..21: mol_type = other DNA
ctgggactcatcagagccatc

SEQ ID NO: 12625 - DNA, 21 bp, synthetic construct
  misc_feature 1..21: note = Synthetic
  source 1..21: mol_type = other DNA
ctgggagcacgtcttggggga

SEQ ID NO: 12626 - DNA, 21 bp, synthetic construct
  misc_feature 1..21: note = Synthetic
  source 1..21: mol_type = other DNA
ctgggagcacgtcttgggggg

SEQ ID NO: 12627 - DNA, 21 bp, synthetic construct
  misc_feature 1..21: note = Synthetic
  source 1..21: mol_type = other DNA
ctgggatcacaggcacgtgcc

SEQ ID NO: 12628 - DNA, 21 bp, synthetic construct
  misc_feature 1..21: note = Synthetic
  source 1..21: mol_type = other DNA
ctgggatcccatcccaacaca

SEQ ID NO: 12629 - DNA, 21 bp, synthetic construct
  misc_feature 1..21: note = Synthetic
  source 1..21: mol_type = other DNA
ctgggattacaggcgtgagcc

SEQ ID NO: 12630 - DNA, 21 bp, synthetic construct
  misc_feature 1..21: note = Synthetic
  source 1..21: mol_type = other DNA
ctgggattacaggcgtgaggc

SEQ ID NO: 12631 - DNA, 21 bp, synthetic construct
  misc_feature 1..21: note = Synthetic
  source 1..21: mol_type = other DNA
ctgggcagggacgggactcca

SEQ ID NO: 12632 - DNA, 21 bp, synthetic construct
  misc_feature 1..21: note = Synthetic
  source 1..21: mol_type = other DNA
ctgggccaccagctggaagcc

SEQ ID NO: 12633 - DNA, 21 bp, synthetic construct
  misc_feature 1..21: note = Synthetic
  source 1..21: mol_type = other DNA
ctgggcctgacatcccctccc

SEQ ID NO: 12634 - DNA, 21 bp, synthetic construct
  misc_feature 1..21: note = Synthetic
  source 1..21: mol_type = other DNA
ctgggctcaggcgatcctcct

SEQ ID NO: 12635 - DNA, 21 bp, synthetic construct
  misc_feature 1..21: note = Synthetic
  source 1..21: mol_type = other DNA
ctgggcttcttctcatttcct

SEQ ID NO: 12636 - DNA, 21 bp, synthetic construct
  misc_feature 1..21: note = Synthetic
  source 1..21: mol_type = other DNA
ctggggacaattgccaatccc

SEQ ID NO: 12637 - DNA, 21 bp, synthetic construct
  misc_feature 1..21: note = Synthetic
  source 1..21: mol_type = other DNA
ctggggacagtaggttttcag

SEQ ID NO: 12638 - DNA, 21 bp, synthetic construct
  misc_feature 1..21: note = Synthetic
  source 1..21: mol_type = other DNA
ctgggggatgcaggtggagct

SEQ ID NO: 12639 - DNA, 21 bp, synthetic construct
  misc_feature 1..21: note = Synthetic
  source 1..21: mol_type = other DNA
ctgggggggacacagtgtttt

SEQ ID NO: 12640 - DNA, 21 bp, synthetic construct
  misc_feature 1..21: note = Synthetic
  source 1..21: mol_type = other DNA
ctgggtgaggttgtggaagag

SEQ ID NO: 12641 - DNA, 21 bp, synthetic construct
  misc_feature 1..21: note = Synthetic
  source 1..21: mol_type = other DNA
ctgggtgcaggccacgtgtcc

SEQ ID NO: 12642 - DNA, 21 bp, synthetic construct
  misc_feature 1..21: note = Synthetic
  source 1..21: mol_type = other DNA
ctgggtgctgcagatcattct

SEQ ID NO: 12643 - DNA, 21 bp, synthetic construct
  misc_feature 1..21: note = Synthetic
  source 1..21: mol_type = other DNA
ctgggtggccactgcagcctc

SEQ ID NO: 12644 - DNA, 21 bp, synthetic construct
  misc_feature 1..21: note = Synthetic
  source 1..21: mol_type = other DNA
ctgggtgggtcatgattcggg

SEQ ID NO: 12645 - DNA, 21 bp, synthetic construct
  misc_feature 1..21: note = Synthetic
  source 1..21: mol_type = other DNA
ctggtccccccgggcctgttt

SEQ ID NO: 12646 - DNA, 21 bp, synthetic construct
  misc_feature 1..21: note = Synthetic
  source 1..21: mol_type = other DNA
ctggtctccaactcctgaact

SEQ ID NO: 12647 - DNA, 21 bp, synthetic construct
  misc_feature 1..21: note = Synthetic
  source 1..21: mol_type = other DNA
ctggtggggcgagggcgcccc

SEQ ID NO: 12648 - DNA, 21 bp, synthetic construct
  misc_feature 1..21: note = Synthetic
  source 1..21: mol_type = other DNA
ctggtgtactcgctccggtcc

SEQ ID NO: 12649 - DNA, 21 bp, synthetic construct
  misc_feature 1..21: note = Synthetic
  source 1..21: mol_type = other DNA
ctggtgtcctgacagccacac

SEQ ID NO: 12650 - DNA, 21 bp, synthetic construct
  misc_feature 1..21: note = Synthetic
  source 1..21: mol_type = other DNA
ctggttgtggcaaatgtggac

SEQ ID NO: 12651 - DNA, 21 bp, synthetic construct
  misc_feature 1..21: note = Synthetic
  source 1..21: mol_type = other DNA
ctgtacagggacgcatttacg

SEQ ID NO: 12652 - DNA, 21 bp, synthetic construct
  misc_feature 1..21: note = Synthetic
  source 1..21: mol_type = other DNA
ctgtagccgtcctggttgtgg

SEQ ID NO: 12653 - DNA, 21 bp, synthetic construct
  misc_feature 1..21: note = Synthetic
  source 1..21: mol_type = other DNA
ctgtagggagaggcacgctct

SEQ ID NO: 12654 - DNA, 21 bp, synthetic construct
  misc_feature 1..21: note = Synthetic
  source 1..21: mol_type = other DNA
ctgtcaagctgggtgctgcag

SEQ ID NO: 12655 - DNA, 21 bp, synthetic construct
  misc_feature 1..21: note = Synthetic
  source 1..21: mol_type = other DNA
ctgtcacacagctgcccccga

SEQ ID NO: 12656 - DNA, 21 bp, synthetic construct
  misc_feature 1..21: note = Synthetic
  source 1..21: mol_type = other DNA
ctgtcactgtctctccggaca

SEQ ID NO: 12657 - DNA, 21 bp, synthetic construct
  misc_feature 1..21: note = Synthetic
  source 1..21: mol_type = other DNA
ctgtccaaaatactttgtcct

SEQ ID NO: 12658 - DNA, 21 bp, synthetic construct
  misc_feature 1..21: note = Synthetic
  source 1..21: mol_type = other DNA
ctgtccccggcattcattgac

SEQ ID NO: 12659 - DNA, 21 bp, synthetic construct
  misc_feature 1..21: note = Synthetic
  source 1..21: mol_type = other DNA
ctgtccccttggaacacgtaa

SEQ ID NO: 12660 - DNA, 21 bp, synthetic construct
  misc_feature 1..21: note = Synthetic
  source 1..21: mol_type = other DNA
ctgtccgaagcctgttctgcc

SEQ ID NO: 12661 - DNA, 21 bp, synthetic construct
  misc_feature 1..21: note = Synthetic
  source 1..21: mol_type = other DNA
ctgtcgcccacgtggctgaag

SEQ ID NO: 12662 - DNA, 21 bp, synthetic construct
  misc_feature 1..21: note = Synthetic
  source 1..21: mol_type = other DNA
ctgtcgcccactgcagtcccc

SEQ ID NO: 12663 - DNA, 21 bp, synthetic construct
  misc_feature 1..21: note = Synthetic
  source 1..21: mol_type = other DNA
ctgtcgcccaggccagactgc

SEQ ID NO: 12664 - DNA, 21 bp, synthetic construct
  misc_feature 1..21: note = Synthetic
  source 1..21: mol_type = other DNA
ctgtctagcaaggcttgcata

SEQ ID NO: 12665 - DNA, 21 bp, synthetic construct
  misc_feature 1..21: note = Synthetic
  source 1..21: mol_type = other DNA
ctgtctcgaggggtagctgta

SEQ ID NO: 12666 - DNA, 21 bp, synthetic construct
  misc_feature 1..21: note = Synthetic
  source 1..21: mol_type = other DNA
ctgtctctccggacatcagtg

SEQ ID NO: 12667 - DNA, 21 bp, synthetic construct
  misc_feature 1..21: note = Synthetic
  source 1..21: mol_type = other DNA
ctgtctttgaataaaacaagg

SEQ ID NO: 12668 - DNA, 21 bp, synthetic construct
  misc_feature 1..21: note = Synthetic
  source 1..21: mol_type = other DNA
ctgtgaacttgatcggggctg

SEQ ID NO: 12669 - DNA, 21 bp, synthetic construct
  misc_feature 1..21: note = Synthetic
  source 1..21: mol_type = other DNA
ctgtgacacttgaacttgttg

SEQ ID NO: 12670 - DNA, 21 bp, synthetic construct
  misc_feature 1..21: note = Synthetic
  source 1..21: mol_type = other DNA
ctgtgaggcagctcctcatgt

SEQ ID NO: 12671 - DNA, 21 bp, synthetic construct
  misc_feature 1..21: note = Synthetic
  source 1..21: mol_type = other DNA
ctgtgaggcggttggcactga

SEQ ID NO: 12672 - DNA, 21 bp, synthetic construct
  misc_feature 1..21: note = Synthetic
  source 1..21: mol_type = other DNA
ctgtggagctgacctttagcc

SEQ ID NO: 12673 - DNA, 21 bp, synthetic construct
  misc_feature 1..21: note = Synthetic
  source 1..21: mol_type = other DNA
ctgtggatccagtccacagcc

SEQ ID NO: 12674 - DNA, 21 bp, synthetic construct
  misc_feature 1..21: note = Synthetic
  source 1..21: mol_type = other DNA
ctgtggtcttctgatagacgg

SEQ ID NO: 12675 - DNA, 21 bp, synthetic construct
  misc_feature 1..21: note = Synthetic
  source 1..21: mol_type = other DNA
ctgtgtcctagctggaaaccc

SEQ ID NO: 12676 - DNA, 21 bp, synthetic construct
  misc_feature 1..21: note = Synthetic
  source 1..21: mol_type = other DNA
ctgtgtccttacggctgtgga

SEQ ID NO: 12677 - DNA, 21 bp, synthetic construct
  misc_feature 1..21: note = Synthetic
  source 1..21: mol_type = other DNA
ctgtgtctggccaaattcatt

SEQ ID NO: 12678 - DNA, 21 bp, synthetic construct
  misc_feature 1..21: note = Synthetic
  source 1..21: mol_type = other DNA
ctgttctgcctcccagatgaa

SEQ ID NO: 12679 - DNA, 21 bp, synthetic construct
  misc_feature 1..21: note = Synthetic
  source 1..21: mol_type = other DNA
ctgttgatgttcttaagccgc

SEQ ID NO: 12680 - DNA, 21 bp, synthetic construct
  misc_feature 1..21: note = Synthetic
  source 1..21: mol_type = other DNA
ctgttgcactggaagctggcg

SEQ ID NO: 12681 - DNA, 21 bp, synthetic construct
  misc_feature 1..21: note = Synthetic
  source 1..21: mol_type = other DNA
ctgttgcccaggctggagtgc

SEQ ID NO: 12682 - DNA, 21 bp, synthetic construct
  misc_feature 1..21: note = Synthetic
  source 1..21: mol_type = other DNA
ctgttgtgtgttgaaagccac

SEQ ID NO: 12683 - DNA, 21 bp, synthetic construct
  misc_feature 1..21: note = Synthetic
  source 1..21: mol_type = other DNA
ctgtttctcttatccttcacg

SEQ ID NO: 12684 - DNA, 21 bp, synthetic construct
  misc_feature 1..21: note = Synthetic
  source 1..21: mol_type = other DNA
cttaagccgccagttcttcca

SEQ ID NO: 12685 - DNA, 21 bp, synthetic construct
  misc_feature 1..21: note = Synthetic
  source 1..21: mol_type = other DNA
cttaaggaaggtacaaaccca

SEQ ID NO: 12686 - DNA, 21 bp, synthetic construct
  misc_feature 1..21: note = Synthetic
  source 1..21: mol_type = other DNA
cttaaggtcattgcagacgtg

SEQ ID NO: 12687 - DNA, 21 bp, synthetic construct
  misc_feature 1..21: note = Synthetic
  source 1..21: mol_type = other DNA
cttaataaatattaagggtga

SEQ ID NO: 12688 - DNA, 21 bp, synthetic construct
  misc_feature 1..21: note = Synthetic
  source 1..21: mol_type = other DNA
cttacggctgtggagctgacc

SEQ ID NO: 12689 - DNA, 21 bp, synthetic construct
  misc_feature 1..21: note = Synthetic
  source 1..21: mol_type = other DNA
cttactatgttgcccaggctg

SEQ ID NO: 12690 - DNA, 21 bp, synthetic construct
  misc_feature 1..21: note = Synthetic
  source 1..21: mol_type = other DNA
cttagagattggtggatgagg

SEQ ID NO: 12691 - DNA, 21 bp, synthetic construct
  misc_feature 1..21: note = Synthetic
  source 1..21: mol_type = other DNA
cttaggcagtggaactcgaag

SEQ ID NO: 12692 - DNA, 21 bp, synthetic construct
  misc_feature 1..21: note = Synthetic
  source 1..21: mol_type = other DNA
cttatcacggttccctgcact

SEQ ID NO: 12693 - DNA, 21 bp, synthetic construct
  misc_feature 1..21: note = Synthetic
  source 1..21: mol_type = other DNA
cttatccttcacgaggaaagg

SEQ ID NO: 12694 - DNA, 21 bp, synthetic construct
  misc_feature 1..21: note = Synthetic
  source 1..21: mol_type = other DNA
cttcacgaggaaaggaagaaa

SEQ ID NO: 12695 - DNA, 21 bp, synthetic construct
  misc_feature 1..21: note = Synthetic
  source 1..21: mol_type = other DNA
cttcacgcccttggtatccgc

SEQ ID NO: 12696 - DNA, 21 bp, synthetic construct
  misc_feature 1..21: note = Synthetic
  source 1..21: mol_type = other DNA
cttcacgcgggagtctgacgg

SEQ ID NO: 12697 - DNA, 21 bp, synthetic construct
  misc_feature 1..21: note = Synthetic
  source 1..21: mol_type = other DNA
cttcatcgctcatgtccttgc

SEQ ID NO: 12698 - DNA, 21 bp, synthetic construct
  misc_feature 1..21: note = Synthetic
  source 1..21: mol_type = other DNA
cttcatctgttgcccaggctg

SEQ ID NO: 12699 - DNA, 21 bp, synthetic construct
  misc_feature 1..21: note = Synthetic
  source 1..21: mol_type = other DNA
cttccatagaaggaagacccc

SEQ ID NO: 12700 - DNA, 21 bp, synthetic construct
  misc_feature 1..21: note = Synthetic
  source 1..21: mol_type = other DNA
cttccatgtttgaggattgtg

SEQ ID NO: 12701 - DNA, 21 bp, synthetic construct
  misc_feature 1..21: note = Synthetic
  source 1..21: mol_type = other DNA
cttcccatcgtggcagcgaaa

SEQ ID NO: 12702 - DNA, 21 bp, synthetic construct
  misc_feature 1..21: note = Synthetic
  source 1..21: mol_type = other DNA
cttcccgggttcacaccattc

SEQ ID NO: 12703 - DNA, 21 bp, synthetic construct
  misc_feature 1..21: note = Synthetic
  source 1..21: mol_type = other DNA
cttccggttgcccccgttgac

SEQ ID NO: 12704 - DNA, 21 bp, synthetic construct
  misc_feature 1..21: note = Synthetic
  source 1..21: mol_type = other DNA
cttcctcacactggcacttgt

SEQ ID NO: 12705 - DNA, 21 bp, synthetic construct
  misc_feature 1..21: note = Synthetic
  source 1..21: mol_type = other DNA
cttcctgacctcgtgccggtt

SEQ ID NO: 12706 - DNA, 21 bp, synthetic construct
  misc_feature 1..21: note = Synthetic
  source 1..21: mol_type = other DNA
cttcctggagagaaatggagg

SEQ ID NO: 12707 - DNA, 21 bp, synthetic construct
  misc_feature 1..21: note = Synthetic
  source 1..21: mol_type = other DNA
cttcgcagtcggggtcgttgt

SEQ ID NO: 12708 - DNA, 21 bp, synthetic construct
  misc_feature 1..21: note = Synthetic
  source 1..21: mol_type = other DNA
cttcgcatcttcgctgggcca

SEQ ID NO: 12709 - DNA, 21 bp, synthetic construct
  misc_feature 1..21: note = Synthetic
  source 1..21: mol_type = other DNA
cttcgccaggagggcccagga

SEQ ID NO: 12710 - DNA, 21 bp, synthetic construct
  misc_feature 1..21: note = Synthetic
  source 1..21: mol_type = other DNA
cttcgctgggccaccagctgg

SEQ ID NO: 12711 - DNA, 21 bp, synthetic construct
  misc_feature 1..21: note = Synthetic
  source 1..21: mol_type = other DNA
cttcgtgtgggggtccagctg

SEQ ID NO: 12712 - DNA, 21 bp, synthetic construct
  misc_feature 1..21: note = Synthetic
  source 1..21: mol_type = other DNA
cttcgttgatgatatctgtcc

SEQ ID NO: 12713 - DNA, 21 bp, synthetic construct
  misc_feature 1..21: note = Synthetic
  source 1..21: mol_type = other DNA
cttctatacagtggtttaaaa

SEQ ID NO: 12714 - DNA, 21 bp, synthetic construct
  misc_feature 1..21: note = Synthetic
  source 1..21: mol_type = other DNA
cttctcatttcctctgccagc

SEQ ID NO: 12715 - DNA, 21 bp, synthetic construct
  misc_feature 1..21: note = Synthetic
  source 1..21: mol_type = other DNA
cttctctgggcctgacatccc

SEQ ID NO: 12716 - DNA, 21 bp, synthetic construct
  misc_feature 1..21: note = Synthetic
  source 1..21: mol_type = other DNA
cttctctgtctttgaataaaa

SEQ ID NO: 12717 - DNA, 21 bp, synthetic construct
  misc_feature 1..21: note = Synthetic
  source 1..21: mol_type = other DNA
cttctgatagacggggttgtc

SEQ ID NO: 12718 - DNA, 21 bp, synthetic construct
  misc_feature 1..21: note = Synthetic
  source 1..21: mol_type = other DNA
cttcttctcatttcctctgcc

SEQ ID NO: 12719 - DNA, 21 bp, synthetic construct
  misc_feature 1..21: note = Synthetic
  source 1..21: mol_type = other DNA
cttgaacttgttgggtccctc

SEQ ID NO: 12720 - DNA, 21 bp, synthetic construct
  misc_feature 1..21: note = Synthetic
  source 1..21: mol_type = other DNA
cttgagatggagtgaagtttg

SEQ ID NO: 12721 - DNA, 21 bp, synthetic construct
  misc_feature 1..21: note = Synthetic
  source 1..21: mol_type = other DNA
cttgagggtggccgggggccc

SEQ ID NO: 12722 - DNA, 21 bp, synthetic construct
  misc_feature 1..21: note = Synthetic
  source 1..21: mol_type = other DNA
cttgatcggggctggtggggc

SEQ ID NO: 12723 - DNA, 21 bp, synthetic construct
  misc_feature 1..21: note = Synthetic
  source 1..21: mol_type = other DNA
cttgatcttggcgggagttcc

SEQ ID NO: 12724 - DNA, 21 bp, synthetic construct
  misc_feature 1..21: note = Synthetic
  source 1..21: mol_type = other DNA
cttgcaggccttcgtgtgggg

SEQ ID NO: 12725 - DNA, 21 bp, synthetic construct
  misc_feature 1..21: note = Synthetic
  source 1..21: mol_type = other DNA
cttgcagtcatattcccggtc

SEQ ID NO: 12726 - DNA, 21 bp, synthetic construct
  misc_feature 1..21: note = Synthetic
  source 1..21: mol_type = other DNA
cttgcagtcggggccaccatc

SEQ ID NO: 12727 - DNA, 21 bp, synthetic construct
  misc_feature 1..21: note = Synthetic
  source 1..21: mol_type = other DNA
cttgcatagaagaggtaaaca

SEQ ID NO: 12728 - DNA, 21 bp, synthetic construct
  misc_feature 1..21: note = Synthetic
  source 1..21: mol_type = other DNA
cttgctcgtctgagccgttgt

SEQ ID NO: 12729 - DNA, 21 bp, synthetic construct
  misc_feature 1..21: note = Synthetic
  source 1..21: mol_type = other DNA
cttgcttctctgggcctgaca

SEQ ID NO: 12730 - DNA, 21 bp, synthetic construct
  misc_feature 1..21: note = Synthetic
  source 1..21: mol_type = other DNA
cttggaacacgtaaagacccc

SEQ ID NO: 12731 - DNA, 21 bp, synthetic construct
  misc_feature 1..21: note = Synthetic
  source 1..21: mol_type = other DNA
cttggagccgttctccctgaa

SEQ ID NO: 12732 - DNA, 21 bp, synthetic construct
  misc_feature 1..21: note = Synthetic
  source 1..21: mol_type = other DNA
cttggaggcatttgcatagaa

SEQ ID NO: 12733 - DNA, 21 bp, synthetic construct
  misc_feature 1..21: note = Synthetic
  source 1..21: mol_type = other DNA
cttggcactggaactcgtttc

SEQ ID NO: 12734 - DNA, 21 bp, synthetic construct
  misc_feature 1..21: note = Synthetic
  source 1..21: mol_type = other DNA
cttggccatcgcacctccaga

SEQ ID NO: 12735 - DNA, 21 bp, synthetic construct
  misc_feature 1..21: note = Synthetic
  source 1..21: mol_type = other DNA
cttggcgggagttccccagtc

SEQ ID NO: 12736 - DNA, 21 bp, synthetic construct
  misc_feature 1..21: note = Synthetic
  source 1..21: mol_type = other DNA
cttggctgggtgaggttgtgg

SEQ ID NO: 12737 - DNA, 21 bp, synthetic construct
  misc_feature 1..21: note = Synthetic
  source 1..21: mol_type = other DNA
cttggcttggagccgttctcc

SEQ ID NO: 12738 - DNA, 21 bp, synthetic construct
  misc_feature 1..21: note = Synthetic
  source 1..21: mol_type = other DNA
cttgggcgagtgggggttgat

SEQ ID NO: 12739 - DNA, 21 bp, synthetic construct
  misc_feature 1..21: note = Synthetic
  source 1..21: mol_type = other DNA
cttgggggagcacgtctcctg

SEQ ID NO: 12740 - DNA, 21 bp, synthetic construct
  misc_feature 1..21: note = Synthetic
  source 1..21: mol_type = other DNA
cttggggggacagccttgctc

SEQ ID NO: 12741 - DNA, 21 bp, synthetic construct
  misc_feature 1..21: note = Synthetic
  source 1..21: mol_type = other DNA
cttggtatccgcaacagagac

SEQ ID NO: 12742 - DNA, 21 bp, synthetic construct
  misc_feature 1..21: note = Synthetic
  source 1..21: mol_type = other DNA
cttggtgagacattgtcacta

SEQ ID NO: 12743 - DNA, 21 bp, synthetic construct
  misc_feature 1..21: note = Synthetic
  source 1..21: mol_type = other DNA
cttgtagccaccctccaggtt

SEQ ID NO: 12744 - DNA, 21 bp, synthetic construct
  misc_feature 1..21: note = Synthetic
  source 1..21: mol_type = other DNA
cttgtaggagatgcatttccc

SEQ ID NO: 12745 - DNA, 21 bp, synthetic construct
  misc_feature 1..21: note = Synthetic
  source 1..21: mol_type = other DNA
cttgtcgtcgcctttgtgaca

SEQ ID NO: 12746 - DNA, 21 bp, synthetic construct
  misc_feature 1..21: note = Synthetic
  source 1..21: mol_type = other DNA
cttgtgacatcttcacgcggg

SEQ ID NO: 12747 - DNA, 21 bp, synthetic construct
  misc_feature 1..21: note = Synthetic
  source 1..21: mol_type = other DNA
cttgttgggtccctcgcagag

SEQ ID NO: 12748 - DNA, 21 bp, synthetic construct
  misc_feature 1..21: note = Synthetic
  source 1..21: mol_type = other DNA
ctttagcctgacggtggatgt

SEQ ID NO: 12749 - DNA, 21 bp, synthetic construct
  misc_feature 1..21: note = Synthetic
  source 1..21: mol_type = other DNA
ctttcatcttccatgtttgag

SEQ ID NO: 12750 - DNA, 21 bp, synthetic construct
  misc_feature 1..21: note = Synthetic
  source 1..21: mol_type = other DNA
ctttccctggcctgggatccc

SEQ ID NO: 12751 - DNA, 21 bp, synthetic construct
  misc_feature 1..21: note = Synthetic
  source 1..21: mol_type = other DNA
ctttcctggcttaaggaaggt

SEQ ID NO: 12752 - DNA, 21 bp, synthetic construct
  misc_feature 1..21: note = Synthetic
  source 1..21: mol_type = other DNA
ctttcgcatctgtcgcccacg

SEQ ID NO: 12753 - DNA, 21 bp, synthetic construct
  misc_feature 1..21: note = Synthetic
  source 1..21: mol_type = other DNA
ctttcgcatctgtcgcccact

SEQ ID NO: 12754 - DNA, 21 bp, synthetic construct
  misc_feature 1..21: note = Synthetic
  source 1..21: mol_type = other DNA
ctttcttgatcttggcgggag

SEQ ID NO: 12755 - DNA, 21 bp, synthetic construct
  misc_feature 1..21: note = Synthetic
  source 1..21: mol_type = other DNA
ctttgaagtcccggtcaacct

SEQ ID NO: 12756 - DNA, 21 bp, synthetic construct
  misc_feature 1..21: note = Synthetic
  source 1..21: mol_type = other DNA
ctttgaataaaacaaggccgg

SEQ ID NO: 12757 - DNA, 21 bp, synthetic construct
  misc_feature 1..21: note = Synthetic
  source 1..21: mol_type = other DNA
ctttgatgggttcatctgacc

SEQ ID NO: 12758 - DNA, 21 bp, synthetic construct
  misc_feature 1..21: note = Synthetic
  source 1..21: mol_type = other DNA
ctttggtcttctctgtctttg

SEQ ID NO: 12759 - DNA, 21 bp, synthetic construct
  misc_feature 1..21: note = Synthetic
  source 1..21: mol_type = other DNA
ctttgtacataaagaagaggc

SEQ ID NO: 12760 - DNA, 21 bp, synthetic construct
  misc_feature 1..21: note = Synthetic
  source 1..21: mol_type = other DNA
ctttgtccagggtgatgcatt

SEQ ID NO: 12761 - DNA, 21 bp, synthetic construct
  misc_feature 1..21: note = Synthetic
  source 1..21: mol_type = other DNA
ctttgtcctcaaagacggcca

SEQ ID NO: 12762 - DNA, 21 bp, synthetic construct
  misc_feature 1..21: note = Synthetic
  source 1..21: mol_type = other DNA
ctttgtgacaggaaccgcgga

SEQ ID NO: 12763 - DNA, 21 bp, synthetic construct
  misc_feature 1..21: note = Synthetic
  source 1..21: mol_type = other DNA
ctttgttgctcaggcctggtc

SEQ ID NO: 12764 - DNA, 21 bp, synthetic construct
  misc_feature 1..21: note = Synthetic
  source 1..21: mol_type = other DNA
cttttcatcctccaagatggt

SEQ ID NO: 12765 - DNA, 21 bp, synthetic construct
  misc_feature 1..21: note = Synthetic
  source 1..21: mol_type = other DNA
ctttttggtttttgtagagat

SEQ ID NO: 12766 - DNA, 21 bp, synthetic construct
  misc_feature 1..21: note = Synthetic
  source 1..21: mol_type = other DNA
gaaaacagtgcaaaataataa

SEQ ID NO: 12767 - DNA, 21 bp, synthetic construct
  misc_feature 1..21: note = Synthetic
  source 1..21: mol_type = other DNA
gaaaatggcttcgttgatgat

SEQ ID NO: 12768 - DNA, 21 bp, synthetic construct
  misc_feature 1..21: note = Synthetic
  source 1..21: mol_type = other DNA
gaaaccaaaatcccaacccaa

SEQ ID NO: 12769 - DNA, 21 bp, synthetic construct
  misc_feature 1..21: note = Synthetic
  source 1..21: mol_type = other DNA
gaaaccagaaaggcttatcac

SEQ ID NO: 12770 - DNA, 21 bp, synthetic construct
  misc_feature 1..21: note = Synthetic
  source 1..21: mol_type = other DNA
gaaaccctggcttcccgcgat

SEQ ID NO: 12771 - DNA, 21 bp, synthetic construct
  misc_feature 1..21: note = Synthetic
  source 1..21: mol_type = other DNA
gaaaccggggacttcgccagg

SEQ ID NO: 12772 - DNA, 21 bp, synthetic construct
  misc_feature 1..21: note = Synthetic
  source 1..21: mol_type = other DNA
gaaactcaaaacttcctggag

SEQ ID NO: 12773 - DNA, 21 bp, synthetic construct
  misc_feature 1..21: note = Synthetic
  source 1..21: mol_type = other DNA
gaaactcgtcctgggagcacg

SEQ ID NO: 12774 - DNA, 21 bp, synthetic construct
  misc_feature 1..21: note = Synthetic
  source 1..21: mol_type = other DNA
gaaagaacctgaagtcccgtc

SEQ ID NO: 12775 - DNA, 21 bp, synthetic construct
  misc_feature 1..21: note = Synthetic
  source 1..21: mol_type = other DNA
gaaagacactgggtgggtcat

SEQ ID NO: 12776 - DNA, 21 bp, synthetic construct
  misc_feature 1..21: note = Synthetic
  source 1..21: mol_type = other DNA
gaaagcagtggcataatcata

SEQ ID NO: 12777 - DNA, 21 bp, synthetic construct
  misc_feature 1..21: note = Synthetic
  source 1..21: mol_type = other DNA
gaaagccacttgcttctctgg

SEQ ID NO: 12778 - DNA, 21 bp, synthetic construct
  misc_feature 1..21: note = Synthetic
  source 1..21: mol_type = other DNA
gaaaggaagaaaccaaaatcc

SEQ ID NO: 12779 - DNA, 21 bp, synthetic construct
  misc_feature 1..21: note = Synthetic
  source 1..21: mol_type = other DNA
gaaaggcttatcacggttccc

SEQ ID NO: 12780 - DNA, 21 bp, synthetic construct
  misc_feature 1..21: note = Synthetic
  source 1..21: mol_type = other DNA
gaaagtgcaaggagaccacgg

SEQ ID NO: 12781 - DNA, 21 bp, synthetic construct
  misc_feature 1..21: note = Synthetic
  source 1..21: mol_type = other DNA
gaaatagggtcttcatctgtt

SEQ ID NO: 12782 - DNA, 21 bp, synthetic construct
  misc_feature 1..21: note = Synthetic
  source 1..21: mol_type = other DNA
gaaatggaggtgtcatcctgg

SEQ ID NO: 12783 - DNA, 21 bp, synthetic construct
  misc_feature 1..21: note = Synthetic
  source 1..21: mol_type = other DNA
gaaatttaattgatcacagta

SEQ ID NO: 12784 - DNA, 21 bp, synthetic construct
  misc_feature 1..21: note = Synthetic
  source 1..21: mol_type = other DNA
gaacaaatacagcaaccaggg

SEQ ID NO: 12785 - DNA, 21 bp, synthetic construct
  misc_feature 1..21: note = Synthetic
  source 1..21: mol_type = other DNA
gaacacgtaaagacccctaca

SEQ ID NO: 12786 - DNA, 21 bp, synthetic construct
  misc_feature 1..21: note = Synthetic
  source 1..21: mol_type = other DNA
gaacagccgccgttgttgtcc

SEQ ID NO: 12787 - DNA, 21 bp, synthetic construct
  misc_feature 1..21: note = Synthetic
  source 1..21: mol_type = other DNA
gaacaggatccaccacgatgg

SEQ ID NO: 12788 - DNA, 21 bp, synthetic construct
  misc_feature 1..21: note = Synthetic
  source 1..21: mol_type = other DNA
gaacaggtcgggtggttgtgt

SEQ ID NO: 12789 - DNA, 21 bp, synthetic construct
  misc_feature 1..21: note = Synthetic
  source 1..21: mol_type = other DNA
gaaccatatcctctggggaca

SEQ ID NO: 12790 - DNA, 21 bp, synthetic construct
  misc_feature 1..21: note = Synthetic
  source 1..21: mol_type = other DNA
gaaccgaggccttgagggtgg

SEQ ID NO: 12791 - DNA, 21 bp, synthetic construct
  misc_feature 1..21: note = Synthetic
  source 1..21: mol_type = other DNA
gaaccgcggaggaacgccagg

SEQ ID NO: 12792 - DNA, 21 bp, synthetic construct
  misc_feature 1..21: note = Synthetic
  source 1..21: mol_type = other DNA
gaacctgaagtcccgtcaaac

SEQ ID NO: 12793 - DNA, 21 bp, synthetic construct
  misc_feature 1..21: note = Synthetic
  source 1..21: mol_type = other DNA
gaacctgtgaggcggttggca

SEQ ID NO: 12794 - DNA, 21 bp, synthetic construct
  misc_feature 1..21: note = Synthetic
  source 1..21: mol_type = other DNA
gaactcaagtgatccagctca

SEQ ID NO: 12795 - DNA, 21 bp, synthetic construct
  misc_feature 1..21: note = Synthetic
  source 1..21: mol_type = other DNA
gaactcgaaggccgagcaggg

SEQ ID NO: 12796 - DNA, 21 bp, synthetic construct
  misc_feature 1..21: note = Synthetic
  source 1..21: mol_type = other DNA
gaactcgtttctttcgcatct

SEQ ID NO: 12797 - DNA, 21 bp, synthetic construct
  misc_feature 1..21: note = Synthetic
  source 1..21: mol_type = other DNA
gaactgagaaagtgcaaggag

SEQ ID NO: 12798 - DNA, 21 bp, synthetic construct
  misc_feature 1..21: note = Synthetic
  source 1..21: mol_type = other DNA
gaactgaggaatgcagcggtt

SEQ ID NO: 12799 - DNA, 21 bp, synthetic construct
  misc_feature 1..21: note = Synthetic
  source 1..21: mol_type = other DNA
gaactgccgagagatgcactt

SEQ ID NO: 12800 - DNA, 21 bp, synthetic construct
  misc_feature 1..21: note = Synthetic
  source 1..21: mol_type = other DNA
gaacttgatcggggctggtgg

SEQ ID NO: 12801 - DNA, 21 bp, synthetic construct
  misc_feature 1..21: note = Synthetic
  source 1..21: mol_type = other DNA
gaacttgttgggtccctcgca

SEQ ID NO: 12802 - DNA, 21 bp, synthetic construct
  misc_feature 1..21: note = Synthetic
  source 1..21: mol_type = other DNA
gaagaaaccaaaatcccaacc

SEQ ID NO: 12803 - DNA, 21 bp, synthetic construct
  misc_feature 1..21: note = Synthetic
  source 1..21: mol_type = other DNA
gaagaagaggtaggcgatgga

SEQ ID NO: 12804 - DNA, 21 bp, synthetic construct
  misc_feature 1..21: note = Synthetic
  source 1..21: mol_type = other DNA
gaagacccccaggcaaaggaa

SEQ ID NO: 12805 - DNA, 21 bp, synthetic construct
  misc_feature 1..21: note = Synthetic
  source 1..21: mol_type = other DNA
gaagacgaggagcacgatggg

SEQ ID NO: 12806 - DNA, 21 bp, synthetic construct
  misc_feature 1..21: note = Synthetic
  source 1..21: mol_type = other DNA
gaagacgaggagcactgtagg

SEQ ID NO: 12807 - DNA, 21 bp, synthetic construct
  misc_feature 1..21: note = Synthetic
  source 1..21: mol_type = other DNA
gaagagaaccatatcctctgg

SEQ ID NO: 12808 - DNA, 21 bp, synthetic construct
  misc_feature 1..21: note = Synthetic
  source 1..21: mol_type = other DNA
gaagagacgccgtgggctctg

SEQ ID NO: 12809 - DNA, 21 bp, synthetic construct
  misc_feature 1..21: note = Synthetic
  source 1..21: mol_type = other DNA
gaagaggcatttcagaggcaa

SEQ ID NO: 12810 - DNA, 21 bp, synthetic construct
  misc_feature 1..21: note = Synthetic
  source 1..21: mol_type = other DNA
gaagaggtaaacacgttgact

SEQ ID NO: 12811 - DNA, 21 bp, synthetic construct
  misc_feature 1..21: note = Synthetic
  source 1..21: mol_type = other DNA
gaagaggtaggcgatggagcc

SEQ ID NO: 12812 - DNA, 21 bp, synthetic construct
  misc_feature 1..21: note = Synthetic
  source 1..21: mol_type = other DNA
gaagatctcggctgcagacca

SEQ ID NO: 12813 - DNA, 21 bp, synthetic construct
  misc_feature 1..21: note = Synthetic
  source 1..21: mol_type = other DNA
gaagcactaggtgggcggaca

SEQ ID NO: 12814 - DNA, 21 bp, synthetic construct
  misc_feature 1..21: note = Synthetic
  source 1..21: mol_type = other DNA
gaagccactcatacatacaac

SEQ ID NO: 12815 - DNA, 21 bp, synthetic construct
  misc_feature 1..21: note = Synthetic
  source 1..21: mol_type = other DNA
gaagccatgaacaggatccac

SEQ ID NO: 12816 - DNA, 21 bp, synthetic construct
  misc_feature 1..21: note = Synthetic
  source 1..21: mol_type = other DNA
gaagccgtcggggcacaggca

SEQ ID NO: 12817 - DNA, 21 bp, synthetic construct
  misc_feature 1..21: note = Synthetic
  source 1..21: mol_type = other DNA
gaagcctgttctgcctcccag

SEQ ID NO: 12818 - DNA, 21 bp, synthetic construct
  misc_feature 1..21: note = Synthetic
  source 1..21: mol_type = other DNA
gaagccttcctcacactggca

SEQ ID NO: 12819 - DNA, 21 bp, synthetic construct
  misc_feature 1..21: note = Synthetic
  source 1..21: mol_type = other DNA
gaagctggcgggaccacaggt

SEQ ID NO: 12820 - DNA, 21 bp, synthetic construct
  misc_feature 1..21: note = Synthetic
  source 1..21: mol_type = other DNA
gaaggaagacccccaggcaaa

SEQ ID NO: 12821 - DNA, 21 bp, synthetic construct
  misc_feature 1..21: note = Synthetic
  source 1..21: mol_type = other DNA
gaaggccgagcaggggctact

SEQ ID NO: 12822 - DNA, 21 bp, synthetic construct
  misc_feature 1..21: note = Synthetic
  source 1..21: mol_type = other DNA
gaaggggtgggccagcctctt

SEQ ID NO: 12823 - DNA, 21 bp, synthetic construct
  misc_feature 1..21: note = Synthetic
  source 1..21: mol_type = other DNA
gaagggttctgggcagggacg

SEQ ID NO: 12824 - DNA, 21 bp, synthetic construct
  misc_feature 1..21: note = Synthetic
  source 1..21: mol_type = other DNA
gaaggtacaaacccacctcga

SEQ ID NO: 12825 - DNA, 21 bp, synthetic construct
  misc_feature 1..21: note = Synthetic
  source 1..21: mol_type = other DNA
gaagtccccggatttgcaggt

SEQ ID NO: 12826 - DNA, 21 bp, synthetic construct
  misc_feature 1..21: note = Synthetic
  source 1..21: mol_type = other DNA
gaagtcccggtcaacctgccc

SEQ ID NO: 12827 - DNA, 21 bp, synthetic construct
  misc_feature 1..21: note = Synthetic
  source 1..21: mol_type = other DNA
gaagtcccgtcaaacgatcca

SEQ ID NO: 12828 - DNA, 21 bp, synthetic construct
  misc_feature 1..21: note = Synthetic
  source 1..21: mol_type = other DNA
gaagtgaatggcttggaggca

SEQ ID NO: 12829 - DNA, 21 bp, synthetic construct
  misc_feature 1..21: note = Synthetic
  source 1..21: mol_type = other DNA
gaagtggaagcactaggtggg

SEQ ID NO: 12830 - DNA, 21 bp, synthetic construct
  misc_feature 1..21: note = Synthetic
  source 1..21: mol_type = other DNA
gaagtggcatcatttggtgaa

SEQ ID NO: 12831 - DNA, 21 bp, synthetic construct
  misc_feature 1..21: note = Synthetic
  source 1..21: mol_type = other DNA
gaagtgggtaggggtcgggag

SEQ ID NO: 12832 - DNA, 21 bp, synthetic construct
  misc_feature 1..21: note = Synthetic
  source 1..21: mol_type = other DNA
gaagtttggagtcaacccagt

SEQ ID NO: 12833 - DNA, 21 bp, synthetic construct
  misc_feature 1..21: note = Synthetic
  source 1..21: mol_type = other DNA
gaataaaacaaggccggcgag

SEQ ID NO: 12834 - DNA, 21 bp, synthetic construct
  misc_feature 1..21: note = Synthetic
  source 1..21: mol_type = other DNA
gaataaatatataaaacaaag

SEQ ID NO: 12835 - DNA, 21 bp, synthetic construct
  misc_feature 1..21: note = Synthetic
  source 1..21: mol_type = other DNA
gaataacgttttcctcttcac

SEQ ID NO: 12836 - DNA, 21 bp, synthetic construct
  misc_feature 1..21: note = Synthetic
  source 1..21: mol_type = other DNA
gaatagtcactgaacaaatac

SEQ ID NO: 12837 - DNA, 21 bp, synthetic construct
  misc_feature 1..21: note = Synthetic
  source 1..21: mol_type = other DNA
gaatccctttcctggcttaag

SEQ ID NO: 12838 - DNA, 21 bp, synthetic construct
  misc_feature 1..21: note = Synthetic
  source 1..21: mol_type = other DNA
gaatgagtttggtctcggtgc

SEQ ID NO: 12839 - DNA, 21 bp, synthetic construct
  misc_feature 1..21: note = Synthetic
  source 1..21: mol_type = other DNA
gaatgcagcggttgacacggc

SEQ ID NO: 12840 - DNA, 21 bp, synthetic construct
  misc_feature 1..21: note = Synthetic
  source 1..21: mol_type = other DNA
gaatggaagtgggtaggggtc

SEQ ID NO: 12841 - DNA, 21 bp, synthetic construct
  misc_feature 1..21: note = Synthetic
  source 1..21: mol_type = other DNA
gaatggcttggaggcatttgc

SEQ ID NO: 12842 - DNA, 21 bp, synthetic construct
  misc_feature 1..21: note = Synthetic
  source 1..21: mol_type = other DNA
gaatgttttcagtcaccagcg

SEQ ID NO: 12843 - DNA, 21 bp, synthetic construct
  misc_feature 1..21: note = Synthetic
  source 1..21: mol_type = other DNA
gaattcgtcagggcgacaggt

SEQ ID NO: 12844 - DNA, 21 bp, synthetic construct
  misc_feature 1..21: note = Synthetic
  source 1..21: mol_type = other DNA
gacaagattggggaagtgaat

SEQ ID NO: 12845 - DNA, 21 bp, synthetic construct
  misc_feature 1..21: note = Synthetic
  source 1..21: mol_type = other DNA
gacaagcacgtctcctgggac

SEQ ID NO: 12846 - DNA, 21 bp, synthetic construct
  misc_feature 1..21: note = Synthetic
  source 1..21: mol_type = other DNA
gacaaggtggggacggaggtg

SEQ ID NO: 12847 - DNA, 21 bp, synthetic construct
  misc_feature 1..21: note = Synthetic
  source 1..21: mol_type = other DNA
gacaatggacagagccctcac

SEQ ID NO: 12848 - DNA, 21 bp, synthetic construct
  misc_feature 1..21: note = Synthetic
  source 1..21: mol_type = other DNA
gacaatggcagttctcgatat

SEQ ID NO: 12849 - DNA, 21 bp, synthetic construct
  misc_feature 1..21: note = Synthetic
  source 1..21: mol_type = other DNA
gacaattgccaatcccttgtg

SEQ ID NO: 12850 - DNA, 21 bp, synthetic construct
  misc_feature 1..21: note = Synthetic
  source 1..21: mol_type = other DNA
gacacagtgttttgtccctgg

SEQ ID NO: 12851 - DNA, 21 bp, synthetic construct
  misc_feature 1..21: note = Synthetic
  source 1..21: mol_type = other DNA
gacacccatctcccagaagcc

SEQ ID NO: 12852 - DNA, 21 bp, synthetic construct
  misc_feature 1..21: note = Synthetic
  source 1..21: mol_type = other DNA
gacacggcccccacagctgaa

SEQ ID NO: 12853 - DNA, 21 bp, synthetic construct
  misc_feature 1..21: note = Synthetic
  source 1..21: mol_type = other DNA
gacacgggctttccctggcct

SEQ ID NO: 12854 - DNA, 21 bp, synthetic construct
  misc_feature 1..21: note = Synthetic
  source 1..21: mol_type = other DNA
gacactcatcgatatcgcact

SEQ ID NO: 12855 - DNA, 21 bp, synthetic construct
  misc_feature 1..21: note = Synthetic
  source 1..21: mol_type = other DNA
gacactcatcgatatcttcgc

SEQ ID NO: 12856 - DNA, 21 bp, synthetic construct
  misc_feature 1..21: note = Synthetic
  source 1..21: mol_type = other DNA
gacactgggtgggtcatgatt

SEQ ID NO: 12857 - DNA, 21 bp, synthetic construct
  misc_feature 1..21: note = Synthetic
  source 1..21: mol_type = other DNA
gacacttgaacttgttgggtc

SEQ ID NO: 12858 - DNA, 21 bp, synthetic construct
  misc_feature 1..21: note = Synthetic
  source 1..21: mol_type = other DNA
gacagaaaacagtgcaaaata

SEQ ID NO: 12859 - DNA, 21 bp, synthetic construct
  misc_feature 1..21: note = Synthetic
  source 1..21: mol_type = other DNA
gacagacaagcacgtctcctg

SEQ ID NO: 12860 - DNA, 21 bp, synthetic construct
  misc_feature 1..21: note = Synthetic
  source 1..21: mol_type = other DNA
gacagagccctcacgctactg

SEQ ID NO: 12861 - DNA, 21 bp, synthetic construct
  misc_feature 1..21: note = Synthetic
  source 1..21: mol_type = other DNA
gacagagtcggtccagtagat

SEQ ID NO: 12862 - DNA, 21 bp, synthetic construct
  misc_feature 1..21: note = Synthetic
  source 1..21: mol_type = other DNA
gacagccacacctgggtgcag

SEQ ID NO: 12863 - DNA, 21 bp, synthetic construct
  misc_feature 1..21: note = Synthetic
  source 1..21: mol_type = other DNA
gacagcctcaaatgcctgagc

SEQ ID NO: 12864 - DNA, 21 bp, synthetic construct
  misc_feature 1..21: note = Synthetic
  source 1..21: mol_type = other DNA
gacagccttgctcgtctgagc

SEQ ID NO: 12865 - DNA, 21 bp, synthetic construct
  misc_feature 1..21: note = Synthetic
  source 1..21: mol_type = other DNA
gacaggaaccgcggaggaacg

SEQ ID NO: 12866 - DNA, 21 bp, synthetic construct
  misc_feature 1..21: note = Synthetic
  source 1..21: mol_type = other DNA
gacagggcaaaggctaacctg

SEQ ID NO: 12867 - DNA, 21 bp, synthetic construct
  misc_feature 1..21: note = Synthetic
  source 1..21: mol_type = other DNA
gacaggtcagaccagtagatt

SEQ ID NO: 12868 - DNA, 21 bp, synthetic construct
  misc_feature 1..21: note = Synthetic
  source 1..21: mol_type = other DNA
gacaggtggccacagcgcagt

SEQ ID NO: 12869 - DNA, 21 bp, synthetic construct
  misc_feature 1..21: note = Synthetic
  source 1..21: mol_type = other DNA
gacaggtggccacaggacagc

SEQ ID NO: 12870 - DNA, 21 bp, synthetic construct
  misc_feature 1..21: note = Synthetic
  source 1..21: mol_type = other DNA
gacagtaggttttcagccaac

SEQ ID NO: 12871 - DNA, 21 bp, synthetic construct
  misc_feature 1..21: note = Synthetic
  source 1..21: mol_type = other DNA
gacagtgcccaggacagagtc

SEQ ID NO: 12872 - DNA, 21 bp, synthetic construct
  misc_feature 1..21: note = Synthetic
  source 1..21: mol_type = other DNA
gacataaagacgacaatggca

SEQ ID NO: 12873 - DNA, 21 bp, synthetic construct
  misc_feature 1..21: note = Synthetic
  source 1..21: mol_type = other DNA
gacatcagtgcaacagtaaca

SEQ ID NO: 12874 - DNA, 21 bp, synthetic construct
  misc_feature 1..21: note = Synthetic
  source 1..21: mol_type = other DNA
gacatcattctcccaaaaagc

SEQ ID NO: 12875 - DNA, 21 bp, synthetic construct
  misc_feature 1..21: note = Synthetic
  source 1..21: mol_type = other DNA
gacatcccctcccctttcatc

SEQ ID NO: 12876 - DNA, 21 bp, synthetic construct
  misc_feature 1..21: note = Synthetic
  source 1..21: mol_type = other DNA
gacatcgatgcttgagatgga

SEQ ID NO: 12877 - DNA, 21 bp, synthetic construct
  misc_feature 1..21: note = Synthetic
  source 1..21: mol_type = other DNA
gacatcggaacctgtgaggcg

SEQ ID NO: 12878 - DNA, 21 bp, synthetic construct
  misc_feature 1..21: note = Synthetic
  source 1..21: mol_type = other DNA
gacatcttcacgcgggagtct

SEQ ID NO: 12879 - DNA, 21 bp, synthetic construct
  misc_feature 1..21: note = Synthetic
  source 1..21: mol_type = other DNA
gacattcaggctacaaaaacc

SEQ ID NO: 12880 - DNA, 21 bp, synthetic construct
  misc_feature 1..21: note = Synthetic
  source 1..21: mol_type = other DNA
gacattgtcactatctccacc

SEQ ID NO: 12881 - DNA, 21 bp, synthetic construct
  misc_feature 1..21: note = Synthetic
  source 1..21: mol_type = other DNA
gaccaaggaggggcggggaga

SEQ ID NO: 12882 - DNA, 21 bp, synthetic construct
  misc_feature 1..21: note = Synthetic
  source 1..21: mol_type = other DNA
gaccacaggtgagcaccgggc

SEQ ID NO: 12883 - DNA, 21 bp, synthetic construct
  misc_feature 1..21: note = Synthetic
  source 1..21: mol_type = other DNA
gaccacgggaatggaagtggg

SEQ ID NO: 12884 - DNA, 21 bp, synthetic construct
  misc_feature 1..21: note = Synthetic
  source 1..21: mol_type = other DNA
gaccacgttcctcaggttggg

SEQ ID NO: 12885 - DNA, 21 bp, synthetic construct
  misc_feature 1..21: note = Synthetic
  source 1..21: mol_type = other DNA
gaccagagacccagctccgtg

SEQ ID NO: 12886 - DNA, 21 bp, synthetic construct
  misc_feature 1..21: note = Synthetic
  source 1..21: mol_type = other DNA
gaccagtagattctattgctg

SEQ ID NO: 12887 - DNA, 21 bp, synthetic construct
  misc_feature 1..21: note = Synthetic
  source 1..21: mol_type = other DNA
gaccagtcccggcagtctcta

SEQ ID NO: 12888 - DNA, 21 bp, synthetic construct
  misc_feature 1..21: note = Synthetic
  source 1..21: mol_type = other DNA
gaccagtgactcaggctctgc

SEQ ID NO: 12889 - DNA, 21 bp, synthetic construct
  misc_feature 1..21: note = Synthetic
  source 1..21: mol_type = other DNA
gaccatcgaggggtagctgta

SEQ ID NO: 12890 - DNA, 21 bp, synthetic construct
  misc_feature 1..21: note = Synthetic
  source 1..21: mol_type = other DNA
gaccatctgtctcgaggggta

SEQ ID NO: 12891 - DNA, 21 bp, synthetic construct
  misc_feature 1..21: note = Synthetic
  source 1..21: mol_type = other DNA
gacccacttgtaggagatgca

SEQ ID NO: 12892 - DNA, 21 bp, synthetic construct
  misc_feature 1..21: note = Synthetic
  source 1..21: mol_type = other DNA
gacccagctccgtggcgatgg

SEQ ID NO: 12893 - DNA, 21 bp, synthetic construct
  misc_feature 1..21: note = Synthetic
  source 1..21: mol_type = other DNA
gacccccaggcaaaggaagac

SEQ ID NO: 12894 - DNA, 21 bp, synthetic construct
  misc_feature 1..21: note = Synthetic
  source 1..21: mol_type = other DNA
gacccctacagcgctgcggcc

SEQ ID NO: 12895 - DNA, 21 bp, synthetic construct
  misc_feature 1..21: note = Synthetic
  source 1..21: mol_type = other DNA
gacccggatcacgacctgctg

SEQ ID NO: 12896 - DNA, 21 bp, synthetic construct
  misc_feature 1..21: note = Synthetic
  source 1..21: mol_type = other DNA
gacccgggacttgtcgtcgcc

SEQ ID NO: 12897 - DNA, 21 bp, synthetic construct
  misc_feature 1..21: note = Synthetic
  source 1..21: mol_type = other DNA
gacctcatcctctgtggtctt

SEQ ID NO: 12898 - DNA, 21 bp, synthetic construct
  misc_feature 1..21: note = Synthetic
  source 1..21: mol_type = other DNA
gacctcatgatccacccgcct

SEQ ID NO: 12899 - DNA, 21 bp, synthetic construct
  misc_feature 1..21: note = Synthetic
  source 1..21: mol_type = other DNA
gacctcgtgccggttggtgaa

SEQ ID NO: 12900 - DNA, 21 bp, synthetic construct
  misc_feature 1..21: note = Synthetic
  source 1..21: mol_type = other DNA
gacctgctgtgtcctagctgg

SEQ ID NO: 12901 - DNA, 21 bp, synthetic construct
  misc_feature 1..21: note = Synthetic
  source 1..21: mol_type = other DNA
gacctttagcctgacggtgga

SEQ ID NO: 12902 - DNA, 21 bp, synthetic construct
  misc_feature 1..21: note = Synthetic
  source 1..21: mol_type = other DNA
gacgaactgccgagagatgca

SEQ ID NO: 12903 - DNA, 21 bp, synthetic construct
  misc_feature 1..21: note = Synthetic
  source 1..21: mol_type = other DNA
gacgacaatggcagttctcga

SEQ ID NO: 12904 - DNA, 21 bp, synthetic construct
  misc_feature 1..21: note = Synthetic
  source 1..21: mol_type = other DNA
gacgaggagcacgatggggag

SEQ ID NO: 12905 - DNA, 21 bp, synthetic construct
  misc_feature 1..21: note = Synthetic
  source 1..21: mol_type = other DNA
gacgaggagcactgtagggag

SEQ ID NO: 12906 - DNA, 21 bp, synthetic construct
  misc_feature 1..21: note = Synthetic
  source 1..21: mol_type = other DNA
gacgcatttacgtgctccgaa

SEQ ID NO: 12907 - DNA, 21 bp, synthetic construct
  misc_feature 1..21: note = Synthetic
  source 1..21: mol_type = other DNA
gacgccatgaatccctttcct

SEQ ID NO: 12908 - DNA, 21 bp, synthetic construct
  misc_feature 1..21: note = Synthetic
  source 1..21: mol_type = other DNA
gacgccgtgggctctgtcaag

SEQ ID NO: 12909 - DNA, 21 bp, synthetic construct
  misc_feature 1..21: note = Synthetic
  source 1..21: mol_type = other DNA
gacggaggctgtcactgtctc

SEQ ID NO: 12910 - DNA, 21 bp, synthetic construct
  misc_feature 1..21: note = Synthetic
  source 1..21: mol_type = other DNA
gacggaggtgtcgccacagag

SEQ ID NO: 12911 - DNA, 21 bp, synthetic construct
  misc_feature 1..21: note = Synthetic
  source 1..21: mol_type = other DNA
gacggagtctcgctctgtcgc

SEQ ID NO: 12912 - DNA, 21 bp, synthetic construct
  misc_feature 1..21: note = Synthetic
  source 1..21: mol_type = other DNA
gacggccaaggagaaggggtg

SEQ ID NO: 12913 - DNA, 21 bp, synthetic construct
  misc_feature 1..21: note = Synthetic
  source 1..21: mol_type = other DNA
gacgggactccaggcagatgt

SEQ ID NO: 12914 - DNA, 21 bp, synthetic construct
  misc_feature 1..21: note = Synthetic
  source 1..21: mol_type = other DNA
gacggggttgtcaaagttgat

SEQ ID NO: 12915 - DNA, 21 bp, synthetic construct
  misc_feature 1..21: note = Synthetic
  source 1..21: mol_type = other DNA
gacggggtttcacgtgttagc

SEQ ID NO: 12916 - DNA, 21 bp, synthetic construct
  misc_feature 1..21: note = Synthetic
  source 1..21: mol_type = other DNA
gacggtccagcgcaatttcca

SEQ ID NO: 12917 - DNA, 21 bp, synthetic construct
  misc_feature 1..21: note = Synthetic
  source 1..21: mol_type = other DNA
gacggtggatgtctcctgggt

SEQ ID NO: 12918 - DNA, 21 bp, synthetic construct
  misc_feature 1..21: note = Synthetic
  source 1..21: mol_type = other DNA
gacggtgtcataggaagagac

SEQ ID NO: 12919 - DNA, 21 bp, synthetic construct
  misc_feature 1..21: note = Synthetic
  source 1..21: mol_type = other DNA
gacgtgggaacagccgccgtt

SEQ ID NO: 12920 - DNA, 21 bp, synthetic construct
  misc_feature 1..21: note = Synthetic
  source 1..21: mol_type = other DNA
gactacaggtgcccgccacca

SEQ ID NO: 12921 - DNA, 21 bp, synthetic construct
  misc_feature 1..21: note = Synthetic
  source 1..21: mol_type = other DNA
gactcaggctctgcctctggg

SEQ ID NO: 12922 - DNA, 21 bp, synthetic construct
  misc_feature 1..21: note = Synthetic
  source 1..21: mol_type = other DNA
gactcatcagagccatcctgg

SEQ ID NO: 12923 - DNA, 21 bp, synthetic construct
  misc_feature 1..21: note = Synthetic
  source 1..21: mol_type = other DNA
gactccaggcagatgttcacg

SEQ ID NO: 12924 - DNA, 21 bp, synthetic construct
  misc_feature 1..21: note = Synthetic
  source 1..21: mol_type = other DNA
gactcctgagtttaggggttt

SEQ ID NO: 12925 - DNA, 21 bp, synthetic construct
  misc_feature 1..21: note = Synthetic
  source 1..21: mol_type = other DNA
gactcgtgtatgtcgcggagg

SEQ ID NO: 12926 - DNA, 21 bp, synthetic construct
  misc_feature 1..21: note = Synthetic
  source 1..21: mol_type = other DNA
gactgaccatcgaggggtagc

SEQ ID NO: 12927 - DNA, 21 bp, synthetic construct
  misc_feature 1..21: note = Synthetic
  source 1..21: mol_type = other DNA
gactgaccatctgtctcgagg

SEQ ID NO: 12928 - DNA, 21 bp, synthetic construct
  misc_feature 1..21: note = Synthetic
  source 1..21: mol_type = other DNA
gactgcagtggcgcaatctcg

SEQ ID NO: 12929 - DNA, 21 bp, synthetic construct
  misc_feature 1..21: note = Synthetic
  source 1..21: mol_type = other DNA
gactgcggactgcagtggcgc

SEQ ID NO: 12930 - DNA, 21 bp, synthetic construct
  misc_feature 1..21: note = Synthetic
  source 1..21: mol_type = other DNA
gactggaggatttatttattt

SEQ ID NO: 12931 - DNA, 21 bp, synthetic construct
  misc_feature 1..21: note = Synthetic
  source 1..21: mol_type = other DNA
gacttcgccaggagggcccag

SEQ ID NO: 12932 - DNA, 21 bp, synthetic construct
  misc_feature 1..21: note = Synthetic
  source 1..21: mol_type = other DNA
gacttgtcgtcgcctttgtga

SEQ ID NO: 12933 - DNA, 21 bp, synthetic construct
  misc_feature 1..21: note = Synthetic
  source 1..21: mol_type = other DNA
gactttgtccagggtgatgca

SEQ ID NO: 12934 - DNA, 21 bp, synthetic construct
  misc_feature 1..21: note = Synthetic
  source 1..21: mol_type = other DNA
gagaaactcaaaacttcctgg

SEQ ID NO: 12935 - DNA, 21 bp, synthetic construct
  misc_feature 1..21: note = Synthetic
  source 1..21: mol_type = other DNA
gagaaagtgcaaggagaccac

SEQ ID NO: 12936 - DNA, 21 bp, synthetic construct
  misc_feature 1..21: note = Synthetic
  source 1..21: mol_type = other DNA
gagaaatggaggtgtcatcct

SEQ ID NO: 12937 - DNA, 21 bp, synthetic construct
  misc_feature 1..21: note = Synthetic
  source 1..21: mol_type = other DNA
gagaaccatatcctctgggga

SEQ ID NO: 12938 - DNA, 21 bp, synthetic construct
  misc_feature 1..21: note = Synthetic
  source 1..21: mol_type = other DNA
gagaaggggtgggccagcctc

SEQ ID NO: 12939 - DNA, 21 bp, synthetic construct
  misc_feature 1..21: note = Synthetic
  source 1..21: mol_type = other DNA
gagaatagtcactgaacaaat

SEQ ID NO: 12940 - DNA, 21 bp, synthetic construct
  misc_feature 1..21: note = Synthetic
  source 1..21: mol_type = other DNA
gagacagtgcccaggacagag

SEQ ID NO: 12941 - DNA, 21 bp, synthetic construct
  misc_feature 1..21: note = Synthetic
  source 1..21: mol_type = other DNA
gagacattgtcactatctcca

SEQ ID NO: 12942 - DNA, 21 bp, synthetic construct
  misc_feature 1..21: note = Synthetic
  source 1..21: mol_type = other DNA
gagaccacgggaatggaagtg

SEQ ID NO: 12943 - DNA, 21 bp, synthetic construct
  misc_feature 1..21: note = Synthetic
  source 1..21: mol_type = other DNA
gagaccagagacccagctccg

SEQ ID NO: 12944 - DNA, 21 bp, synthetic construct
  misc_feature 1..21: note = Synthetic
  source 1..21: mol_type = other DNA
gagacccagctccgtggcgat

SEQ ID NO: 12945 - DNA, 21 bp, synthetic construct
  misc_feature 1..21: note = Synthetic
  source 1..21: mol_type = other DNA
gagacgccgtgggctctgtca

SEQ ID NO: 12946 - DNA, 21 bp, synthetic construct
  misc_feature 1..21: note = Synthetic
  source 1..21: mol_type = other DNA
gagacggagtctcgctctgtc

SEQ ID NO: 12947 - DNA, 21 bp, synthetic construct
  misc_feature 1..21: note = Synthetic
  source 1..21: mol_type = other DNA
gagacggggtttcacgtgtta

SEQ ID NO: 12948 - DNA, 21 bp, synthetic construct
  misc_feature 1..21: note = Synthetic
  source 1..21: mol_type = other DNA
gagagaaactcaaaacttcct

SEQ ID NO: 12949 - DNA, 21 bp, synthetic construct
  misc_feature 1..21: note = Synthetic
  source 1..21: mol_type = other DNA
gagagaaatggaggtgtcatc

SEQ ID NO: 12950 - DNA, 21 bp, synthetic construct
  misc_feature 1..21: note = Synthetic
  source 1..21: mol_type = other DNA
gagagatgcacttcccatcgt

SEQ ID NO: 12951 - DNA, 21 bp, synthetic construct
  misc_feature 1..21: note = Synthetic
  source 1..21: mol_type = other DNA
gagaggcacgctctgtcacac

SEQ ID NO: 12952 - DNA, 21 bp, synthetic construct
  misc_feature 1..21: note = Synthetic
  source 1..21: mol_type = other DNA
gagatctagggtgatgccatt

SEQ ID NO: 12953 - DNA, 21 bp, synthetic construct
  misc_feature 1..21: note = Synthetic
  source 1..21: mol_type = other DNA
gagatgcacttcccatcgtgg

SEQ ID NO: 12954 - DNA, 21 bp, synthetic construct
  misc_feature 1..21: note = Synthetic
  source 1..21: mol_type = other DNA
gagatgcatttcccgtcttgg

SEQ ID NO: 12955 - DNA, 21 bp, synthetic construct
  misc_feature 1..21: note = Synthetic
  source 1..21: mol_type = other DNA
gagatggagtgaagtttggag

SEQ ID NO: 12956 - DNA, 21 bp, synthetic construct
  misc_feature 1..21: note = Synthetic
  source 1..21: mol_type = other DNA
gagatgggatctcgctttgtt

SEQ ID NO: 12957 - DNA, 21 bp, synthetic construct
  misc_feature 1..21: note = Synthetic
  source 1..21: mol_type = other DNA
gagatggggtcttactatgtt

SEQ ID NO: 12958 - DNA, 21 bp, synthetic construct
  misc_feature 1..21: note = Synthetic
  source 1..21: mol_type = other DNA
gagattctgaggcaacgtttc

SEQ ID NO: 12959 - DNA, 21 bp, synthetic construct
  misc_feature 1..21: note = Synthetic
  source 1..21: mol_type = other DNA
gagattggtggatgaggcagg

SEQ ID NO: 12960 - DNA, 21 bp, synthetic construct
  misc_feature 1..21: note = Synthetic
  source 1..21: mol_type = other DNA
gagcaaggcgacggtccagcg

SEQ ID NO: 12961 - DNA, 21 bp, synthetic construct
  misc_feature 1..21: note = Synthetic
  source 1..21: mol_type = other DNA
gagcacagcggaaaccgggga

SEQ ID NO: 12962 - DNA, 21 bp, synthetic construct
  misc_feature 1..21: note = Synthetic
  source 1..21: mol_type = other DNA
gagcaccgggcaggaggcctc

SEQ ID NO: 12963 - DNA, 21 bp, synthetic construct
  misc_feature 1..21: note = Synthetic
  source 1..21: mol_type = other DNA
gagcacgatggggaggacaat

SEQ ID NO: 12964 - DNA, 21 bp, synthetic construct
  misc_feature 1..21: note = Synthetic
  source 1..21: mol_type = other DNA
gagcacgtctcctgggactca

SEQ ID NO: 12965 - DNA, 21 bp, synthetic construct
  misc_feature 1..21: note = Synthetic
  source 1..21: mol_type = other DNA
gagcacgtcttgggggagcac

SEQ ID NO: 12966 - DNA, 21 bp, synthetic construct
  misc_feature 1..21: note = Synthetic
  source 1..21: mol_type = other DNA
gagcacgtcttggggggacag

SEQ ID NO: 12967 - DNA, 21 bp, synthetic construct
  misc_feature 1..21: note = Synthetic
  source 1..21: mol_type = other DNA
gagcactggaattcgtcaggg

SEQ ID NO: 12968 - DNA, 21 bp, synthetic construct
  misc_feature 1..21: note = Synthetic
  source 1..21: mol_type = other DNA
gagcactgtagggagaggcac

SEQ ID NO: 12969 - DNA, 21 bp, synthetic construct
  misc_feature 1..21: note = Synthetic
  source 1..21: mol_type = other DNA
gagcaggggctactgtcccct

SEQ ID NO: 12970 - DNA, 21 bp, synthetic construct
  misc_feature 1..21: note = Synthetic
  source 1..21: mol_type = other DNA
gagccactgcgcccggcctca

SEQ ID NO: 12971 - DNA, 21 bp, synthetic construct
  misc_feature 1..21: note = Synthetic
  source 1..21: mol_type = other DNA
gagccatcctggcactcagcg

SEQ ID NO: 12972 - DNA, 21 bp, synthetic construct
  misc_feature 1..21: note = Synthetic
  source 1..21: mol_type = other DNA
gagccatcttcgcagtcgggg

SEQ ID NO: 12973 - DNA, 21 bp, synthetic construct
  misc_feature 1..21: note = Synthetic
  source 1..21: mol_type = other DNA
gagcccacagccttgcaggcc

SEQ ID NO: 12974 - DNA, 21 bp, synthetic construct
  misc_feature 1..21: note = Synthetic
  source 1..21: mol_type = other DNA
gagcccaggggtggccccagg

SEQ ID NO: 12975 - DNA, 21 bp, synthetic construct
  misc_feature 1..21: note = Synthetic
  source 1..21: mol_type = other DNA
gagccctcacgctactgggct

SEQ ID NO: 12976 - DNA, 21 bp, synthetic construct
  misc_feature 1..21: note = Synthetic
  source 1..21: mol_type = other DNA
gagccgtccaagcagtcccgg

SEQ ID NO: 12977 - DNA, 21 bp, synthetic construct
  misc_feature 1..21: note = Synthetic
  source 1..21: mol_type = other DNA
gagccgttctccctgaataac

SEQ ID NO: 12978 - DNA, 21 bp, synthetic construct
  misc_feature 1..21: note = Synthetic
  source 1..21: mol_type = other DNA
gagccgttgtcgcagtccact

SEQ ID NO: 12979 - DNA, 21 bp, synthetic construct
  misc_feature 1..21: note = Synthetic
  source 1..21: mol_type = other DNA
gagcgaccacgttcctcaggt

SEQ ID NO: 12980 - DNA, 21 bp, synthetic construct
  misc_feature 1..21: note = Synthetic
  source 1..21: mol_type = other DNA
gagctcaaaccatcctcccac

SEQ ID NO: 12981 - DNA, 21 bp, synthetic construct
  misc_feature 1..21: note = Synthetic
  source 1..21: mol_type = other DNA
gagctgacctttagcctgacg

SEQ ID NO: 12982 - DNA, 21 bp, synthetic construct
  misc_feature 1..21: note = Synthetic
  source 1..21: mol_type = other DNA
gagctggctgcaggtgtcggg

SEQ ID NO: 12983 - DNA, 21 bp, synthetic construct
  misc_feature 1..21: note = Synthetic
  source 1..21: mol_type = other DNA
gagctgttgcactggaagctg

SEQ ID NO: 12984 - DNA, 21 bp, synthetic construct
  misc_feature 1..21: note = Synthetic
  source 1..21: mol_type = other DNA
gagcttggtgagacattgtca

SEQ ID NO: 12985 - DNA, 21 bp, synthetic construct
  misc_feature 1..21: note = Synthetic
  source 1..21: mol_type = other DNA
gaggaaaggaagaaaccaaaa

SEQ ID NO: 12986 - DNA, 21 bp, synthetic construct
  misc_feature 1..21: note = Synthetic
  source 1..21: mol_type = other DNA
gaggaacgccaggcctcccct

SEQ ID NO: 12987 - DNA, 21 bp, synthetic construct
  misc_feature 1..21: note = Synthetic
  source 1..21: mol_type = other DNA
gaggaatgcagcggttgacac

SEQ ID NO: 12988 - DNA, 21 bp, synthetic construct
  misc_feature 1..21: note = Synthetic
  source 1..21: mol_type = other DNA
gaggacaatggacagagccct

SEQ ID NO: 12989 - DNA, 21 bp, synthetic construct
  misc_feature 1..21: note = Synthetic
  source 1..21: mol_type = other DNA
gaggagatctagggtgatgcc

SEQ ID NO: 12990 - DNA, 21 bp, synthetic construct
  misc_feature 1..21: note = Synthetic
  source 1..21: mol_type = other DNA
gaggagcaaggcgacggtcca

SEQ ID NO: 12991 - DNA, 21 bp, synthetic construct
  misc_feature 1..21: note = Synthetic
  source 1..21: mol_type = other DNA
gaggagcacgatggggaggac

SEQ ID NO: 12992 - DNA, 21 bp, synthetic construct
  misc_feature 1..21: note = Synthetic
  source 1..21: mol_type = other DNA
gaggagcactgtagggagagg

SEQ ID NO: 12993 - DNA, 21 bp, synthetic construct
  misc_feature 1..21: note = Synthetic
  source 1..21: mol_type = other DNA
gaggatgggcaccaggctggt

SEQ ID NO: 12994 - DNA, 21 bp, synthetic construct
  misc_feature 1..21: note = Synthetic
  source 1..21: mol_type = other DNA
gaggattgtgtcacggtggag

SEQ ID NO: 12995 - DNA, 21 bp, synthetic construct
  misc_feature 1..21: note = Synthetic
  source 1..21: mol_type = other DNA
gaggatttatttattttttta

SEQ ID NO: 12996 - DNA, 21 bp, synthetic construct
  misc_feature 1..21: note = Synthetic
  source 1..21: mol_type = other DNA
gaggcaacgtttcaacctcgt

SEQ ID NO: 12997 - DNA, 21 bp, synthetic construct
  misc_feature 1..21: note = Synthetic
  source 1..21: mol_type = other DNA
gaggcaataaccccctacaca

SEQ ID NO: 12998 - DNA, 21 bp, synthetic construct
  misc_feature 1..21: note = Synthetic
  source 1..21: mol_type = other DNA
gaggcacagatactggcagcc

SEQ ID NO: 12999 - DNA, 21 bp, synthetic construct
  misc_feature 1..21: note = Synthetic
  source 1..21: mol_type = other DNA
gaggcacctgtgtctggccaa

SEQ ID NO: 13000 - DNA, 21 bp, synthetic construct
  misc_feature 1..21: note = Synthetic
  source 1..21: mol_type = other DNA
gaggcacgctctgtcacacag

SEQ ID NO: 13001 - DNA, 21 bp, synthetic construct
  misc_feature 1..21: note = Synthetic
  source 1..21: mol_type = other DNA
gaggcagctcctcatgtccct

SEQ ID NO: 13002 - DNA, 21 bp, synthetic construct
  misc_feature 1..21: note = Synthetic
  source 1..21: mol_type = other DNA
gaggcagggccagggggtccc

SEQ ID NO: 13003 - DNA, 21 bp, synthetic construct
  misc_feature 1..21: note = Synthetic
  source 1..21: mol_type = other DNA
gaggcatttcagaggcaataa

SEQ ID NO: 13004 - DNA, 21 bp, synthetic construct
  misc_feature 1..21: note = Synthetic
  source 1..21: mol_type = other DNA
gaggcatttgcatagaagtgg

SEQ ID NO: 13005 - DNA, 21 bp, synthetic construct
  misc_feature 1..21: note = Synthetic
  source 1..21: mol_type = other DNA
gaggccatgggctgctgatgc

SEQ ID NO: 13006 - DNA, 21 bp, synthetic construct
  misc_feature 1..21: note = Synthetic
  source 1..21: mol_type = other DNA
gaggcctcgtctgagccgtcc

SEQ ID NO: 13007 - DNA, 21 bp, synthetic construct
  misc_feature 1..21: note = Synthetic
  source 1..21: mol_type = other DNA
gaggccttgagggtggccggg

SEQ ID NO: 13008 - DNA, 21 bp, synthetic construct
  misc_feature 1..21: note = Synthetic
  source 1..21: mol_type = other DNA
gaggcggccactgaggagatc

SEQ ID NO: 13009 - DNA, 21 bp, synthetic construct
  misc_feature 1..21: note = Synthetic
  source 1..21: mol_type = other DNA
gaggcggctccggggacccgg

SEQ ID NO: 13010 - DNA, 21 bp, synthetic construct
  misc_feature 1..21: note = Synthetic
  source 1..21: mol_type = other DNA
gaggcggttggcactgaaaat

SEQ ID NO: 13011 - DNA, 21 bp, synthetic construct
  misc_feature 1..21: note = Synthetic
  source 1..21: mol_type = other DNA
gaggctggtgtactcgctccg

SEQ ID NO: 13012 - DNA, 21 bp, synthetic construct
  misc_feature 1..21: note = Synthetic
  source 1..21: mol_type = other DNA
gaggctgtcactgtctctccg

SEQ ID NO: 13013 - DNA, 21 bp, synthetic construct
  misc_feature 1..21: note = Synthetic
  source 1..21: mol_type = other DNA
gagggcccaggataacggagg

SEQ ID NO: 13014 - DNA, 21 bp, synthetic construct
  misc_feature 1..21: note = Synthetic
  source 1..21: mol_type = other DNA
gagggcgactcgtgtatgtcg

SEQ ID NO: 13015 - DNA, 21 bp, synthetic construct
  misc_feature 1..21: note = Synthetic
  source 1..21: mol_type = other DNA
gagggcgccccccaggacaag

SEQ ID NO: 13016 - DNA, 21 bp, synthetic construct
  misc_feature 1..21: note = Synthetic
  source 1..21: mol_type = other DNA
gaggggcggggagattctgag

SEQ ID NO: 13017 - DNA, 21 bp, synthetic construct
  misc_feature 1..21: note = Synthetic
  source 1..21: mol_type = other DNA
gaggggtagctgtagccgtcc

SEQ ID NO: 13018 - DNA, 21 bp, synthetic construct
  misc_feature 1..21: note = Synthetic
  source 1..21: mol_type = other DNA
gagggtggccgggggcccctc

SEQ ID NO: 13019 - DNA, 21 bp, synthetic construct
  misc_feature 1..21: note = Synthetic
  source 1..21: mol_type = other DNA
gaggtaaacacgttgactcct

SEQ ID NO: 13020 - DNA, 21 bp, synthetic construct
  misc_feature 1..21: note = Synthetic
  source 1..21: mol_type = other DNA
gaggtaggcgatggagcccac

SEQ ID NO: 13021 - DNA, 21 bp, synthetic construct
  misc_feature 1..21: note = Synthetic
  source 1..21: mol_type = other DNA
gaggtctcaggaagggttctg

SEQ ID NO: 13022 - DNA, 21 bp, synthetic construct
  misc_feature 1..21: note = Synthetic
  source 1..21: mol_type = other DNA
gaggtgtcatcctggtccccc

SEQ ID NO: 13023 - DNA, 21 bp, synthetic construct
  misc_feature 1..21: note = Synthetic
  source 1..21: mol_type = other DNA
gaggtgtcgccacagagcaca

SEQ ID NO: 13024 - DNA, 21 bp, synthetic construct
  misc_feature 1..21: note = Synthetic
  source 1..21: mol_type = other DNA
gaggtgtcgggaacaggtcgg

SEQ ID NO: 13025 - DNA, 21 bp, synthetic construct
  misc_feature 1..21: note = Synthetic
  source 1..21: mol_type = other DNA
gaggttgtggaagagaaccat

SEQ ID NO: 13026 - DNA, 21 bp, synthetic construct
  misc_feature 1..21: note = Synthetic
  source 1..21: mol_type = other DNA
gagtagatgtccacaccattc

SEQ ID NO: 13027 - DNA, 21 bp, synthetic construct
  misc_feature 1..21: note = Synthetic
  source 1..21: mol_type = other DNA
gagtagctgggactacaggtg

SEQ ID NO: 13028 - DNA, 21 bp, synthetic construct
  misc_feature 1..21: note = Synthetic
  source 1..21: mol_type = other DNA
gagtcaacccagtagaggcgg

SEQ ID NO: 13029 - DNA, 21 bp, synthetic construct
  misc_feature 1..21: note = Synthetic
  source 1..21: mol_type = other DNA
gagtcacagacgaactgccga

SEQ ID NO: 13030 - DNA, 21 bp, synthetic construct
  misc_feature 1..21: note = Synthetic
  source 1..21: mol_type = other DNA
gagtcggtccagtagatgttg

SEQ ID NO: 13031 - DNA, 21 bp, synthetic construct
  misc_feature 1..21: note = Synthetic
  source 1..21: mol_type = other DNA
gagtctcgctctgtcgcccag

SEQ ID NO: 13032 - DNA, 21 bp, synthetic construct
  misc_feature 1..21: note = Synthetic
  source 1..21: mol_type = other DNA
gagtctgacggaggctgtcac

SEQ ID NO: 13033 - DNA, 21 bp, synthetic construct
  misc_feature 1..21: note = Synthetic
  source 1..21: mol_type = other DNA
gagtgaagtttggagtcaacc

SEQ ID NO: 13034 - DNA, 21 bp, synthetic construct
  misc_feature 1..21: note = Synthetic
  source 1..21: mol_type = other DNA
gagtgcagtggctcgatcatg

SEQ ID NO: 13035 - DNA, 21 bp, synthetic construct
  misc_feature 1..21: note = Synthetic
  source 1..21: mol_type = other DNA
gagtggatgcactcgccactt

SEQ ID NO: 13036 - DNA, 21 bp, synthetic construct
  misc_feature 1..21: note = Synthetic
  source 1..21: mol_type = other DNA
gagtgggggttgatctgcggg

SEQ ID NO: 13037 - DNA, 21 bp, synthetic construct
  misc_feature 1..21: note = Synthetic
  source 1..21: mol_type = other DNA
gagtgtcacattaacgcagcc

SEQ ID NO: 13038 - DNA, 21 bp, synthetic construct
  misc_feature 1..21: note = Synthetic
  source 1..21: mol_type = other DNA
gagtgtcagacagccttgctc

SEQ ID NO: 13039 - DNA, 21 bp, synthetic construct
  misc_feature 1..21: note = Synthetic
  source 1..21: mol_type = other DNA
gagttccccagtcagtccagt

SEQ ID NO: 13040 - DNA, 21 bp, synthetic construct
  misc_feature 1..21: note = Synthetic
  source 1..21: mol_type = other DNA
gagtttaggggtttggcttag

SEQ ID NO: 13041 - DNA, 21 bp, synthetic construct
  misc_feature 1..21: note = Synthetic
  source 1..21: mol_type = other DNA
gagtttggtctcggtgccacc

SEQ ID NO: 13042 - DNA, 21 bp, synthetic construct
  misc_feature 1..21: note = Synthetic
  source 1..21: mol_type = other DNA
gataacagtttcaaccaatat

SEQ ID NO: 13043 - DNA, 21 bp, synthetic construct
  misc_feature 1..21: note = Synthetic
  source 1..21: mol_type = other DNA
gataacggagggcgactcgtg

SEQ ID NO: 13044 - DNA, 21 bp, synthetic construct
  misc_feature 1..21: note = Synthetic
  source 1..21: mol_type = other DNA
gatactggcagccgccattgc

SEQ ID NO: 13045 - DNA, 21 bp, synthetic construct
  misc_feature 1..21: note = Synthetic
  source 1..21: mol_type = other DNA
gatagacggggttgtcaaagt

SEQ ID NO: 13046 - DNA, 21 bp, synthetic construct
  misc_feature 1..21: note = Synthetic
  source 1..21: mol_type = other DNA
gatatcgcactctttgatggg

SEQ ID NO: 13047 - DNA, 21 bp, synthetic construct
  misc_feature 1..21: note = Synthetic
  source 1..21: mol_type = other DNA
gatatctgtccaaaatacttt

SEQ ID NO: 13048 - DNA, 21 bp, synthetic construct
  misc_feature 1..21: note = Synthetic
  source 1..21: mol_type = other DNA
gatatcttcgcatcttcgctg

SEQ ID NO: 13049 - DNA, 21 bp, synthetic construct
  misc_feature 1..21: note = Synthetic
  source 1..21: mol_type = other DNA
gatattcacgatcacggcttt

SEQ ID NO: 13050 - DNA, 21 bp, synthetic construct
  misc_feature 1..21: note = Synthetic
  source 1..21: mol_type = other DNA
gatcacaggcacgtgccaccg

SEQ ID NO: 13051 - DNA, 21 bp, synthetic construct
  misc_feature 1..21: note = Synthetic
  source 1..21: mol_type = other DNA
gatcacagtaagacattcagg

SEQ ID NO: 13052 - DNA, 21 bp, synthetic construct
  misc_feature 1..21: note = Synthetic
  source 1..21: mol_type = other DNA
gatcacgacctgctgtgtcct

SEQ ID NO: 13053 - DNA, 21 bp, synthetic construct
  misc_feature 1..21: note = Synthetic
  source 1..21: mol_type = other DNA
gatcacggctttgaagtcccg

SEQ ID NO: 13054 - DNA, 21 bp, synthetic construct
  misc_feature 1..21: note = Synthetic
  source 1..21: mol_type = other DNA
gatcatggctcactgcaacct

SEQ ID NO: 13055 - DNA, 21 bp, synthetic construct
  misc_feature 1..21: note = Synthetic
  source 1..21: mol_type = other DNA
gatcattctctgggacaggtc

SEQ ID NO: 13056 - DNA, 21 bp, synthetic construct
  misc_feature 1..21: note = Synthetic
  source 1..21: mol_type = other DNA
gatcatttccgacgccatgaa

SEQ ID NO: 13057 - DNA, 21 bp, synthetic construct
  misc_feature 1..21: note = Synthetic
  source 1..21: mol_type = other DNA
gatccaccacgatggcccttg

SEQ ID NO: 13058 - DNA, 21 bp, synthetic construct
  misc_feature 1..21: note = Synthetic
  source 1..21: mol_type = other DNA
gatccacccgcctcggcctcc

SEQ ID NO: 13059 - DNA, 21 bp, synthetic construct
  misc_feature 1..21: note = Synthetic
  source 1..21: mol_type = other DNA
gatccagactggaggatttat

SEQ ID NO: 13060 - DNA, 21 bp, synthetic construct
  misc_feature 1..21: note = Synthetic
  source 1..21: mol_type = other DNA
gatccagctcagcctcccaaa

SEQ ID NO: 13061 - DNA, 21 bp, synthetic construct
  misc_feature 1..21: note = Synthetic
  source 1..21: mol_type = other DNA
gatccagtccacagccagccc

SEQ ID NO: 13062 - DNA, 21 bp, synthetic construct
  misc_feature 1..21: note = Synthetic
  source 1..21: mol_type = other DNA
gatcccatcccaacacacacg

SEQ ID NO: 13063 - DNA, 21 bp, synthetic construct
  misc_feature 1..21: note = Synthetic
  source 1..21: mol_type = other DNA
gatcctcctgcctcagcctcc

SEQ ID NO: 13064 - DNA, 21 bp, synthetic construct
  misc_feature 1..21: note = Synthetic
  source 1..21: mol_type = other DNA
gatcctgacactcatcgatat

SEQ ID NO: 13065 - DNA, 21 bp, synthetic construct
  misc_feature 1..21: note = Synthetic
  source 1..21: mol_type = other DNA
gatcggggctggtggggcgag

SEQ ID NO: 13066 - DNA, 21 bp, synthetic construct
  misc_feature 1..21: note = Synthetic
  source 1..21: mol_type = other DNA
gatctagggtgatgccattgg

SEQ ID NO: 13067 - DNA, 21 bp, synthetic construct
  misc_feature 1..21: note = Synthetic
  source 1..21: mol_type = other DNA
gatctcctgacctcatgatcc

SEQ ID NO: 13068 - DNA, 21 bp, synthetic construct
  misc_feature 1..21: note = Synthetic
  source 1..21: mol_type = other DNA
gatctcgctttgttgctcagg

SEQ ID NO: 13069 - DNA, 21 bp, synthetic construct
  misc_feature 1..21: note = Synthetic
  source 1..21: mol_type = other DNA
gatctcggctgcagaccaagg

SEQ ID NO: 13070 - DNA, 21 bp, synthetic construct
  misc_feature 1..21: note = Synthetic
  source 1..21: mol_type = other DNA
gatctgcggggcagggaggca

SEQ ID NO: 13071 - DNA, 21 bp, synthetic construct
  misc_feature 1..21: note = Synthetic
  source 1..21: mol_type = other DNA
gatcttaaggtcattgcagac

SEQ ID NO: 13072 - DNA, 21 bp, synthetic construct
  misc_feature 1..21: note = Synthetic
  source 1..21: mol_type = other DNA
gatcttggcgggagttcccca

SEQ ID NO: 13073 - DNA, 21 bp, synthetic construct
  misc_feature 1..21: note = Synthetic
  source 1..21: mol_type = other DNA
gatgaataaatatataaaaca

SEQ ID NO: 13074 - DNA, 21 bp, synthetic construct
  misc_feature 1..21: note = Synthetic
  source 1..21: mol_type = other DNA
gatgacggtgtcataggaaga

SEQ ID NO: 13075 - DNA, 21 bp, synthetic construct
  misc_feature 1..21: note = Synthetic
  source 1..21: mol_type = other DNA
gatgaggcagggccagggggt

SEQ ID NO: 13076 - DNA, 21 bp, synthetic construct
  misc_feature 1..21: note = Synthetic
  source 1..21: mol_type = other DNA
gatgaggctggtgtactcgct

SEQ ID NO: 13077 - DNA, 21 bp, synthetic construct
  misc_feature 1..21: note = Synthetic
  source 1..21: mol_type = other DNA
gatgatatctgtccaaaatac

SEQ ID NO: 13078 - DNA, 21 bp, synthetic construct
  misc_feature 1..21: note = Synthetic
  source 1..21: mol_type = other DNA
gatgcaccatgcatggttttt

SEQ ID NO: 13079 - DNA, 21 bp, synthetic construct
  misc_feature 1..21: note = Synthetic
  source 1..21: mol_type = other DNA
gatgcactcgccacttaggca

SEQ ID NO: 13080 - DNA, 21 bp, synthetic construct
  misc_feature 1..21: note = Synthetic
  source 1..21: mol_type = other DNA
gatgcacttcccatcgtggca

SEQ ID NO: 13081 - DNA, 21 bp, synthetic construct
  misc_feature 1..21: note = Synthetic
  source 1..21: mol_type = other DNA
gatgcaggtggagctgttgca

SEQ ID NO: 13082 - DNA, 21 bp, synthetic construct
  misc_feature 1..21: note = Synthetic
  source 1..21: mol_type = other DNA
gatgcagtttccatcagagca

SEQ ID NO: 13083 - DNA, 21 bp, synthetic construct
  misc_feature 1..21: note = Synthetic
  source 1..21: mol_type = other DNA
gatgcattcgccgctgtgaca

SEQ ID NO: 13084 - DNA, 21 bp, synthetic construct
  misc_feature 1..21: note = Synthetic
  source 1..21: mol_type = other DNA
gatgcatttcccgtcttggca

SEQ ID NO: 13085 - DNA, 21 bp, synthetic construct
  misc_feature 1..21: note = Synthetic
  source 1..21: mol_type = other DNA
gatgccattgggccactgaat

SEQ ID NO: 13086 - DNA, 21 bp, synthetic construct
  misc_feature 1..21: note = Synthetic
  source 1..21: mol_type = other DNA
gatgctgttgatgttcttaag

SEQ ID NO: 13087 - DNA, 21 bp, synthetic construct
  misc_feature 1..21: note = Synthetic
  source 1..21: mol_type = other DNA
gatgcttgagatggagtgaag

SEQ ID NO: 13088 - DNA, 21 bp, synthetic construct
  misc_feature 1..21: note = Synthetic
  source 1..21: mol_type = other DNA
gatggagcccacagccttgca

SEQ ID NO: 13089 - DNA, 21 bp, synthetic construct
  misc_feature 1..21: note = Synthetic
  source 1..21: mol_type = other DNA
gatggagtgaagtttggagtc

SEQ ID NO: 13090 - DNA, 21 bp, synthetic construct
  misc_feature 1..21: note = Synthetic
  source 1..21: mol_type = other DNA
gatggcccttggcttggagcc

SEQ ID NO: 13091 - DNA, 21 bp, synthetic construct
  misc_feature 1..21: note = Synthetic
  source 1..21: mol_type = other DNA
gatgggatctcgctttgttgc

SEQ ID NO: 13092 - DNA, 21 bp, synthetic construct
  misc_feature 1..21: note = Synthetic
  source 1..21: mol_type = other DNA
gatgggcaccaggctggtgtc

SEQ ID NO: 13093 - DNA, 21 bp, synthetic construct
  misc_feature 1..21: note = Synthetic
  source 1..21: mol_type = other DNA
gatggggaggacaatggacag

SEQ ID NO: 13094 - DNA, 21 bp, synthetic construct
  misc_feature 1..21: note = Synthetic
  source 1..21: mol_type = other DNA
gatggggtcttactatgttgc

SEQ ID NO: 13095 - DNA, 21 bp, synthetic construct
  misc_feature 1..21: note = Synthetic
  source 1..21: mol_type = other DNA
gatgggttcatctgaccagtc

SEQ ID NO: 13096 - DNA, 21 bp, synthetic construct
  misc_feature 1..21: note = Synthetic
  source 1..21: mol_type = other DNA
gatggtctcgatctcctgacc

SEQ ID NO: 13097 - DNA, 21 bp, synthetic construct
  misc_feature 1..21: note = Synthetic
  source 1..21: mol_type = other DNA
gatggtcttccggttgccccc

SEQ ID NO: 13098 - DNA, 21 bp, synthetic construct
  misc_feature 1..21: note = Synthetic
  source 1..21: mol_type = other DNA
gatgtccacaccattcaggcc

SEQ ID NO: 13099 - DNA, 21 bp, synthetic construct
  misc_feature 1..21: note = Synthetic
  source 1..21: mol_type = other DNA
gatgtctcctgggtggccact

SEQ ID NO: 13100 - DNA, 21 bp, synthetic construct
  misc_feature 1..21: note = Synthetic
  source 1..21: mol_type = other DNA
gatgtctctgctgatgacggt

SEQ ID NO: 13101 - DNA, 21 bp, synthetic construct
  misc_feature 1..21: note = Synthetic
  source 1..21: mol_type = other DNA
gatgttcacgccacgtcatcc

SEQ ID NO: 13102 - DNA, 21 bp, synthetic construct
  misc_feature 1..21: note = Synthetic
  source 1..21: mol_type = other DNA
gatgttcttaagccgccagtt

SEQ ID NO: 13103 - DNA, 21 bp, synthetic construct
  misc_feature 1..21: note = Synthetic
  source 1..21: mol_type = other DNA
gatgttgctgtggatccagtc

SEQ ID NO: 13104 - DNA, 21 bp, synthetic construct
  misc_feature 1..21: note = Synthetic
  source 1..21: mol_type = other DNA
gattacaggcgtgagccactg

SEQ ID NO: 13105 - DNA, 21 bp, synthetic construct
  misc_feature 1..21: note = Synthetic
  source 1..21: mol_type = other DNA
gattacaggcgtgaggcacct

SEQ ID NO: 13106 - DNA, 21 bp, synthetic construct
  misc_feature 1..21: note = Synthetic
  source 1..21: mol_type = other DNA
gattcagccagatcatttccg

SEQ ID NO: 13107 - DNA, 21 bp, synthetic construct
  misc_feature 1..21: note = Synthetic
  source 1..21: mol_type = other DNA
gattcgggggtgacagggcaa

SEQ ID NO: 13108 - DNA, 21 bp, synthetic construct
  misc_feature 1..21: note = Synthetic
  source 1..21: mol_type = other DNA
gattctattgctggccacctc

SEQ ID NO: 13109 - DNA, 21 bp, synthetic construct
  misc_feature 1..21: note = Synthetic
  source 1..21: mol_type = other DNA
gattctgaggcaacgtttcaa

SEQ ID NO: 13110 - DNA, 21 bp, synthetic construct
  misc_feature 1..21: note = Synthetic
  source 1..21: mol_type = other DNA
gattggggaagtgaatggctt

SEQ ID NO: 13111 - DNA, 21 bp, synthetic construct
  misc_feature 1..21: note = Synthetic
  source 1..21: mol_type = other DNA
gattggtggatgaggcagggc

SEQ ID NO: 13112 - DNA, 21 bp, synthetic construct
  misc_feature 1..21: note = Synthetic
  source 1..21: mol_type = other DNA
gattgtgtcacggtggagaga

SEQ ID NO: 13113 - DNA, 21 bp, synthetic construct
  misc_feature 1..21: note = Synthetic
  source 1..21: mol_type = other DNA
gatttatttatttttttatag

SEQ ID NO: 13114 - DNA, 21 bp, synthetic construct
  misc_feature 1..21: note = Synthetic
  source 1..21: mol_type = other DNA
gatttcagaaagaacctgaag

SEQ ID NO: 13115 - DNA, 21 bp, synthetic construct
  misc_feature 1..21: note = Synthetic
  source 1..21: mol_type = other DNA
gatttgcaggtgacagacaag

SEQ ID NO: 13116 - DNA, 21 bp, synthetic construct
  misc_feature 1..21: note = Synthetic
  source 1..21: mol_type = other DNA
gatttgtccttgcagtcgggg

SEQ ID NO: 13117 - DNA, 21 bp, synthetic construct
  misc_feature 1..21: note = Synthetic
  source 1..21: mol_type = other DNA
gattttatatatatgtgtgta

SEQ ID NO: 13118 - DNA, 21 bp, synthetic construct
  misc_feature 1..21: note = Synthetic
  source 1..21: mol_type = other DNA
gatttttaactttttggtttt

SEQ ID NO: 13119 - DNA, 21 bp, synthetic construct
  misc_feature 1..21: note = Synthetic
  source 1..21: mol_type = other DNA
gcaaaaataaatagattttat

SEQ ID NO: 13120 - DNA, 21 bp, synthetic construct
  misc_feature 1..21: note = Synthetic
  source 1..21: mol_type = other DNA
gcaaaataataacacaaatgc

SEQ ID NO: 13121 - DNA, 21 bp, synthetic construct
  misc_feature 1..21: note = Synthetic
  source 1..21: mol_type = other DNA
gcaaacataacaaaaaatccc

SEQ ID NO: 13122 - DNA, 21 bp, synthetic construct
  misc_feature 1..21: note = Synthetic
  source 1..21: mol_type = other DNA
gcaaaggaagacgaggagcac

SEQ ID NO: 13123 - DNA, 21 bp, synthetic construct
  misc_feature 1..21: note = Synthetic
  source 1..21: mol_type = other DNA
gcaaaggctaacctggctgtc

SEQ ID NO: 13124 - DNA, 21 bp, synthetic construct
  misc_feature 1..21: note = Synthetic
  source 1..21: mol_type = other DNA
gcaaataatctttgtacataa

SEQ ID NO: 13125 - DNA, 21 bp, synthetic construct
  misc_feature 1..21: note = Synthetic
  source 1..21: mol_type = other DNA
gcaaatgtggacctcatcctc

SEQ ID NO: 13126 - DNA, 21 bp, synthetic construct
  misc_feature 1..21: note = Synthetic
  source 1..21: mol_type = other DNA
gcaacagagacagtgcccagg

SEQ ID NO: 13127 - DNA, 21 bp, synthetic construct
  misc_feature 1..21: note = Synthetic
  source 1..21: mol_type = other DNA
gcaacagtaacacggcgattt

SEQ ID NO: 13128 - DNA, 21 bp, synthetic construct
  misc_feature 1..21: note = Synthetic
  source 1..21: mol_type = other DNA
gcaaccagggtttgcaaaaat

SEQ ID NO: 13129 - DNA, 21 bp, synthetic construct
  misc_feature 1..21: note = Synthetic
  source 1..21: mol_type = other DNA
gcaacctccacctcctgggct

SEQ ID NO: 13130 - DNA, 21 bp, synthetic construct
  misc_feature 1..21: note = Synthetic
  source 1..21: mol_type = other DNA
gcaacgtcgcccagagcttgg

SEQ ID NO: 13131 - DNA, 21 bp, synthetic construct
  misc_feature 1..21: note = Synthetic
  source 1..21: mol_type = other DNA
gcaacgtttcaacctcgtaag

SEQ ID NO: 13132 - DNA, 21 bp, synthetic construct
  misc_feature 1..21: note = Synthetic
  source 1..21: mol_type = other DNA
gcaagctccgcttcccgggtt

SEQ ID NO: 13133 - DNA, 21 bp, synthetic construct
  misc_feature 1..21: note = Synthetic
  source 1..21: mol_type = other DNA
gcaaggagaccacgggaatgg

SEQ ID NO: 13134 - DNA, 21 bp, synthetic construct
  misc_feature 1..21: note = Synthetic
  source 1..21: mol_type = other DNA
gcaaggcgacggtccagcgca

SEQ ID NO: 13135 - DNA, 21 bp, synthetic construct
  misc_feature 1..21: note = Synthetic
  source 1..21: mol_type = other DNA
gcaaggcttgcatagaagagg

SEQ ID NO: 13136 - DNA, 21 bp, synthetic construct
  misc_feature 1..21: note = Synthetic
  source 1..21: mol_type = other DNA
gcaataaccccctacacaggg

SEQ ID NO: 13137 - DNA, 21 bp, synthetic construct
  misc_feature 1..21: note = Synthetic
  source 1..21: mol_type = other DNA
gcaatctcggctcactgcaag

SEQ ID NO: 13138 - DNA, 21 bp, synthetic construct
  misc_feature 1..21: note = Synthetic
  source 1..21: mol_type = other DNA
gcaatgctttggtcttctctg

SEQ ID NO: 13139 - DNA, 21 bp, synthetic construct
  misc_feature 1..21: note = Synthetic
  source 1..21: mol_type = other DNA
gcaatttccagccccagggcc

SEQ ID NO: 13140 - DNA, 21 bp, synthetic construct
  misc_feature 1..21: note = Synthetic
  source 1..21: mol_type = other DNA
gcacacagtccagttcgtgca

SEQ ID NO: 13141 - DNA, 21 bp, synthetic construct
  misc_feature 1..21: note = Synthetic
  source 1..21: mol_type = other DNA
gcacagatactggcagccgcc

SEQ ID NO: 13142 - DNA, 21 bp, synthetic construct
  misc_feature 1..21: note = Synthetic
  source 1..21: mol_type = other DNA
gcacagcggaaaccggggact

SEQ ID NO: 13143 - DNA, 21 bp, synthetic construct
  misc_feature 1..21: note = Synthetic
  source 1..21: mol_type = other DNA
gcacaggcactcgtagccgat

SEQ ID NO: 13144 - DNA, 21 bp, synthetic construct
  misc_feature 1..21: note = Synthetic
  source 1..21: mol_type = other DNA
gcaccaggctggtgtcctgac

SEQ ID NO: 13145 - DNA, 21 bp, synthetic construct
  misc_feature 1..21: note = Synthetic
  source 1..21: mol_type = other DNA
gcaccatgcatggtttttttt

SEQ ID NO: 13146 - DNA, 21 bp, synthetic construct
  misc_feature 1..21: note = Synthetic
  source 1..21: mol_type = other DNA
gcaccgggcaggaggcctcgt

SEQ ID NO: 13147 - DNA, 21 bp, synthetic construct
  misc_feature 1..21: note = Synthetic
  source 1..21: mol_type = other DNA
gcacctccagaactgaggaat

SEQ ID NO: 13148 - DNA, 21 bp, synthetic construct
  misc_feature 1..21: note = Synthetic
  source 1..21: mol_type = other DNA
gcacctgtgtctggccaaatt

SEQ ID NO: 13149 - DNA, 21 bp, synthetic construct
  misc_feature 1..21: note = Synthetic
  source 1..21: mol_type = other DNA
gcacgatggggaggacaatgg

SEQ ID NO: 13150 - DNA, 21 bp, synthetic construct
  misc_feature 1..21: note = Synthetic
  source 1..21: mol_type = other DNA
gcacgctctgtcacacagctg

SEQ ID NO: 13151 - DNA, 21 bp, synthetic construct
  misc_feature 1..21: note = Synthetic
  source 1..21: mol_type = other DNA
gcacgtctcctgggactcatc

SEQ ID NO: 13152 - DNA, 21 bp, synthetic construct
  misc_feature 1..21: note = Synthetic
  source 1..21: mol_type = other DNA
gcacgtcttgggggagcacgt

SEQ ID NO: 13153 - DNA, 21 bp, synthetic construct
  misc_feature 1..21: note = Synthetic
  source 1..21: mol_type = other DNA
gcacgtcttggggggacagcc

SEQ ID NO: 13154 - DNA, 21 bp, synthetic construct
  misc_feature 1..21: note = Synthetic
  source 1..21: mol_type = other DNA
gcacgtgccaccgtacccagc

SEQ ID NO: 13155 - DNA, 21 bp, synthetic construct
  misc_feature 1..21: note = Synthetic
  source 1..21: mol_type = other DNA
gcactaggtgggcggacataa

SEQ ID NO: 13156 - DNA, 21 bp, synthetic construct
  misc_feature 1..21: note = Synthetic
  source 1..21: mol_type = other DNA
gcactcagcgctgccatcgca

SEQ ID NO: 13157 - DNA, 21 bp, synthetic construct
  misc_feature 1..21: note = Synthetic
  source 1..21: mol_type = other DNA
gcactcgccacttaggcagtg

SEQ ID NO: 13158 - DNA, 21 bp, synthetic construct
  misc_feature 1..21: note = Synthetic
  source 1..21: mol_type = other DNA
gcactcgtagccgatcttaag

SEQ ID NO: 13159 - DNA, 21 bp, synthetic construct
  misc_feature 1..21: note = Synthetic
  source 1..21: mol_type = other DNA
gcactctttgatgggttcatc

SEQ ID NO: 13160 - DNA, 21 bp, synthetic construct
  misc_feature 1..21: note = Synthetic
  source 1..21: mol_type = other DNA
gcactgaaaatggcttcgttg

SEQ ID NO: 13161 - DNA, 21 bp, synthetic construct
  misc_feature 1..21: note = Synthetic
  source 1..21: mol_type = other DNA
gcactggaactcgtttctttc

SEQ ID NO: 13162 - DNA, 21 bp, synthetic construct
  misc_feature 1..21: note = Synthetic
  source 1..21: mol_type = other DNA
gcactggaagctggcgggacc

SEQ ID NO: 13163 - DNA, 21 bp, synthetic construct
  misc_feature 1..21: note = Synthetic
  source 1..21: mol_type = other DNA
gcactggaattcgtcagggcg

SEQ ID NO: 13164 - DNA, 21 bp, synthetic construct
  misc_feature 1..21: note = Synthetic
  source 1..21: mol_type = other DNA
gcactgggggggacacagtgt

SEQ ID NO: 13165 - DNA, 21 bp, synthetic construct
  misc_feature 1..21: note = Synthetic
  source 1..21: mol_type = other DNA
gcactgtagggagaggcacgc

SEQ ID NO: 13166 - DNA, 21 bp, synthetic construct
  misc_feature 1..21: note = Synthetic
  source 1..21: mol_type = other DNA
gcactgtccgaagcctgttct

SEQ ID NO: 13167 - DNA, 21 bp, synthetic construct
  misc_feature 1..21: note = Synthetic
  source 1..21: mol_type = other DNA
gcacttaataaatattaaggg

SEQ ID NO: 13168 - DNA, 21 bp, synthetic construct
  misc_feature 1..21: note = Synthetic
  source 1..21: mol_type = other DNA
gcacttcccatcgtggcagcg

SEQ ID NO: 13169 - DNA, 21 bp, synthetic construct
  misc_feature 1..21: note = Synthetic
  source 1..21: mol_type = other DNA
gcacttgtagccaccctccag

SEQ ID NO: 13170 - DNA, 21 bp, synthetic construct
  misc_feature 1..21: note = Synthetic
  source 1..21: mol_type = other DNA
gcagaccaaggaggggcgggg

SEQ ID NO: 13171 - DNA, 21 bp, synthetic construct
  misc_feature 1..21: note = Synthetic
  source 1..21: mol_type = other DNA
gcagacccacttgtaggagat

SEQ ID NO: 13172 - DNA, 21 bp, synthetic construct
  misc_feature 1..21: note = Synthetic
  source 1..21: mol_type = other DNA
gcagacgtgggaacagccgcc

SEQ ID NO: 13173 - DNA, 21 bp, synthetic construct
  misc_feature 1..21: note = Synthetic
  source 1..21: mol_type = other DNA
gcagactttgtccagggtgat

SEQ ID NO: 13174 - DNA, 21 bp, synthetic construct
  misc_feature 1..21: note = Synthetic
  source 1..21: mol_type = other DNA
gcagagctggctgcaggtgtc

SEQ ID NO: 13175 - DNA, 21 bp, synthetic construct
  misc_feature 1..21: note = Synthetic
  source 1..21: mol_type = other DNA
gcagagtgtcacattaacgca

SEQ ID NO: 13176 - DNA, 21 bp, synthetic construct
  misc_feature 1..21: note = Synthetic
  source 1..21: mol_type = other DNA
gcagagtgtcagacagccttg

SEQ ID NO: 13177 - DNA, 21 bp, synthetic construct
  misc_feature 1..21: note = Synthetic
  source 1..21: mol_type = other DNA
gcagatcattctctgggacag

SEQ ID NO: 13178 - DNA, 21 bp, synthetic construct
  misc_feature 1..21: note = Synthetic
  source 1..21: mol_type = other DNA
gcagatgttcacgccacgtca

SEQ ID NO: 13179 - DNA, 21 bp, synthetic construct
  misc_feature 1..21: note = Synthetic
  source 1..21: mol_type = other DNA
gcagcatgccgtccgggcagg

SEQ ID NO: 13180 - DNA, 21 bp, synthetic construct
  misc_feature 1..21: note = Synthetic
  source 1..21: mol_type = other DNA
gcagccaacttcatcgctcat

SEQ ID NO: 13181 - DNA, 21 bp, synthetic construct
  misc_feature 1..21: note = Synthetic
  source 1..21: mol_type = other DNA
gcagccgccattgctcagggt

SEQ ID NO: 13182 - DNA, 21 bp, synthetic construct
  misc_feature 1..21: note = Synthetic
  source 1..21: mol_type = other DNA
gcagccgggaggtgtcgggaa

SEQ ID NO: 13183 - DNA, 21 bp, synthetic construct
  misc_feature 1..21: note = Synthetic
  source 1..21: mol_type = other DNA
gcagcctcagcctctcttggc

SEQ ID NO: 13184 - DNA, 21 bp, synthetic construct
  misc_feature 1..21: note = Synthetic
  source 1..21: mol_type = other DNA
gcagcctcagcctctgtgagg

SEQ ID NO: 13185 - DNA, 21 bp, synthetic construct
  misc_feature 1..21: note = Synthetic
  source 1..21: mol_type = other DNA
gcagcctctgccaggcagtgt

SEQ ID NO: 13186 - DNA, 21 bp, synthetic construct
  misc_feature 1..21: note = Synthetic
  source 1..21: mol_type = other DNA
gcagcgaaactcgtcctggga

SEQ ID NO: 13187 - DNA, 21 bp, synthetic construct
  misc_feature 1..21: note = Synthetic
  source 1..21: mol_type = other DNA
gcagcggttgacacggccccc

SEQ ID NO: 13188 - DNA, 21 bp, synthetic construct
  misc_feature 1..21: note = Synthetic
  source 1..21: mol_type = other DNA
gcagctcctcatgtccctggc

SEQ ID NO: 13189 - DNA, 21 bp, synthetic construct
  misc_feature 1..21: note = Synthetic
  source 1..21: mol_type = other DNA
gcaggaggcctcgtctgagcc

SEQ ID NO: 13190 - DNA, 21 bp, synthetic construct
  misc_feature 1..21: note = Synthetic
  source 1..21: mol_type = other DNA
gcaggcaatgctttggtcttc

SEQ ID NO: 13191 - DNA, 21 bp, synthetic construct
  misc_feature 1..21: note = Synthetic
  source 1..21: mol_type = other DNA
gcaggccacgtgtcctcacgg

SEQ ID NO: 13192 - DNA, 21 bp, synthetic construct
  misc_feature 1..21: note = Synthetic
  source 1..21: mol_type = other DNA
gcaggcccacagctgggggat

SEQ ID NO: 13193 - DNA, 21 bp, synthetic construct
  misc_feature 1..21: note = Synthetic
  source 1..21: mol_type = other DNA
gcaggccttcgtgtgggggtc

SEQ ID NO: 13194 - DNA, 21 bp, synthetic construct
  misc_feature 1..21: note = Synthetic
  source 1..21: mol_type = other DNA
gcaggcgcaggtaaacttggg

SEQ ID NO: 13195 - DNA, 21 bp, synthetic construct
  misc_feature 1..21: note = Synthetic
  source 1..21: mol_type = other DNA
gcagggacgggactccaggca

SEQ ID NO: 13196 - DNA, 21 bp, synthetic construct
  misc_feature 1..21: note = Synthetic
  source 1..21: mol_type = other DNA
gcagggaggcacagatactgg

SEQ ID NO: 13197 - DNA, 21 bp, synthetic construct
  misc_feature 1..21: note = Synthetic
  source 1..21: mol_type = other DNA
gcagggccagggggtcccgtt

SEQ ID NO: 13198 - DNA, 21 bp, synthetic construct
  misc_feature 1..21: note = Synthetic
  source 1..21: mol_type = other DNA
gcaggggctactgtccccttg

SEQ ID NO: 13199 - DNA, 21 bp, synthetic construct
  misc_feature 1..21: note = Synthetic
  source 1..21: mol_type = other DNA
gcaggtaaacttgggcgagtg

SEQ ID NO: 13200 - DNA, 21 bp, synthetic construct
  misc_feature 1..21: note = Synthetic
  source 1..21: mol_type = other DNA
gcaggtgacagacaagcacgt

SEQ ID NO: 13201 - DNA, 21 bp, synthetic construct
  misc_feature 1..21: note = Synthetic
  source 1..21: mol_type = other DNA
gcaggtggagctgttgcactg

SEQ ID NO: 13202 - DNA, 21 bp, synthetic construct
  misc_feature 1..21: note = Synthetic
  source 1..21: mol_type = other DNA
gcaggtgtcgggatcctgaca

SEQ ID NO: 13203 - DNA, 21 bp, synthetic construct
  misc_feature 1..21: note = Synthetic
  source 1..21: mol_type = other DNA
gcagtcatattcccggtcaca

SEQ ID NO: 13204 - DNA, 21 bp, synthetic construct
  misc_feature 1..21: note = Synthetic
  source 1..21: mol_type = other DNA
gcagtccacttggccatcgca

SEQ ID NO: 13205 - DNA, 21 bp, synthetic construct
  misc_feature 1..21: note = Synthetic
  source 1..21: mol_type = other DNA
gcagtccccgccgcggcgagg

SEQ ID NO: 13206 - DNA, 21 bp, synthetic construct
  misc_feature 1..21: note = Synthetic
  source 1..21: mol_type = other DNA
gcagtcccggtctgagtcaca

SEQ ID NO: 13207 - DNA, 21 bp, synthetic construct
  misc_feature 1..21: note = Synthetic
  source 1..21: mol_type = other DNA
gcagtcggggccaccatcaca

SEQ ID NO: 13208 - DNA, 21 bp, synthetic construct
  misc_feature 1..21: note = Synthetic
  source 1..21: mol_type = other DNA
gcagtcggggtcgttgtcgca

SEQ ID NO: 13209 - DNA, 21 bp, synthetic construct
  misc_feature 1..21: note = Synthetic
  source 1..21: mol_type = other DNA
gcagtctctagccatgttgca

SEQ ID NO: 13210 - DNA, 21 bp, synthetic construct
  misc_feature 1..21: note = Synthetic
  source 1..21: mol_type = other DNA
gcagtggaactcgaaggccga

SEQ ID NO: 13211 - DNA, 21 bp, synthetic construct
  misc_feature 1..21: note = Synthetic
  source 1..21: mol_type = other DNA
gcagtggcataatcatagctc

SEQ ID NO: 13212 - DNA, 21 bp, synthetic construct
  misc_feature 1..21: note = Synthetic
  source 1..21: mol_type = other DNA
gcagtggcgcaatctcggctc

SEQ ID NO: 13213 - DNA, 21 bp, synthetic construct
  misc_feature 1..21: note = Synthetic
  source 1..21: mol_type = other DNA
gcagtggctcgatcatggctc

SEQ ID NO: 13214 - DNA, 21 bp, synthetic construct
  misc_feature 1..21: note = Synthetic
  source 1..21: mol_type = other DNA
gcagtgtcccgacccggatca

SEQ ID NO: 13215 - DNA, 21 bp, synthetic construct
  misc_feature 1..21: note = Synthetic
  source 1..21: mol_type = other DNA
gcagttctcgatattcacgat

SEQ ID NO: 13216 - DNA, 21 bp, synthetic construct
  misc_feature 1..21: note = Synthetic
  source 1..21: mol_type = other DNA
gcagtttccatcagagcactg

SEQ ID NO: 13217 - DNA, 21 bp, synthetic construct
  misc_feature 1..21: note = Synthetic
  source 1..21: mol_type = other DNA
gcagttttcctcgtcagattt

SEQ ID NO: 13218 - DNA, 21 bp, synthetic construct
  misc_feature 1..21: note = Synthetic
  source 1..21: mol_type = other DNA
gcataatcatagctcacgaca

SEQ ID NO: 13219 - DNA, 21 bp, synthetic construct
  misc_feature 1..21: note = Synthetic
  source 1..21: mol_type = other DNA
gcatagaagaggtaaacacgt

SEQ ID NO: 13220 - DNA, 21 bp, synthetic construct
  misc_feature 1..21: note = Synthetic
  source 1..21: mol_type = other DNA
gcatagaagtggaagcactag

SEQ ID NO: 13221 - DNA, 21 bp, synthetic construct
  misc_feature 1..21: note = Synthetic
  source 1..21: mol_type = other DNA
gcatcatttggtgaatgagtt

SEQ ID NO: 13222 - DNA, 21 bp, synthetic construct
  misc_feature 1..21: note = Synthetic
  source 1..21: mol_type = other DNA
gcatctgtcgcccacgtggct

SEQ ID NO: 13223 - DNA, 21 bp, synthetic construct
  misc_feature 1..21: note = Synthetic
  source 1..21: mol_type = other DNA
gcatctgtcgcccactgcagt

SEQ ID NO: 13224 - DNA, 21 bp, synthetic construct
  misc_feature 1..21: note = Synthetic
  source 1..21: mol_type = other DNA
gcatcttcgctgggccaccag

SEQ ID NO: 13225 - DNA, 21 bp, synthetic construct
  misc_feature 1..21: note = Synthetic
  source 1..21: mol_type = other DNA
gcatgccgtccgggcaggcgc

SEQ ID NO: 13226 - DNA, 21 bp, synthetic construct
  misc_feature 1..21: note = Synthetic
  source 1..21: mol_type = other DNA
gcatgggcactgtccgaagcc

SEQ ID NO: 13227 - DNA, 21 bp, synthetic construct
  misc_feature 1..21: note = Synthetic
  source 1..21: mol_type = other DNA
gcatggtttttttttgttttt

SEQ ID NO: 13228 - DNA, 21 bp, synthetic construct
  misc_feature 1..21: note = Synthetic
  source 1..21: mol_type = other DNA
gcatgttttaaacacataccc

SEQ ID NO: 13229 - DNA, 21 bp, synthetic construct
  misc_feature 1..21: note = Synthetic
  source 1..21: mol_type = other DNA
gcattcattgacacgggcttt

SEQ ID NO: 13230 - DNA, 21 bp, synthetic construct
  misc_feature 1..21: note = Synthetic
  source 1..21: mol_type = other DNA
gcattcgccgctgtgacactt

SEQ ID NO: 13231 - DNA, 21 bp, synthetic construct
  misc_feature 1..21: note = Synthetic
  source 1..21: mol_type = other DNA
gcattcgttggtcccgcactc

SEQ ID NO: 13232 - DNA, 21 bp, synthetic construct
  misc_feature 1..21: note = Synthetic
  source 1..21: mol_type = other DNA
gcatttacgtgctccgaaacc

SEQ ID NO: 13233 - DNA, 21 bp, synthetic construct
  misc_feature 1..21: note = Synthetic
  source 1..21: mol_type = other DNA
gcatttcagaggcaataaccc

SEQ ID NO: 13234 - DNA, 21 bp, synthetic construct
  misc_feature 1..21: note = Synthetic
  source 1..21: mol_type = other DNA
gcatttcccgtcttggcactg

SEQ ID NO: 13235 - DNA, 21 bp, synthetic construct
  misc_feature 1..21: note = Synthetic
  source 1..21: mol_type = other DNA
gcatttgcatagaagtggaag

SEQ ID NO: 13236 - DNA, 21 bp, synthetic construct
  misc_feature 1..21: note = Synthetic
  source 1..21: mol_type = other DNA
gccaaatgtacacagtgtaca

SEQ ID NO: 13237 - DNA, 21 bp, synthetic construct
  misc_feature 1..21: note = Synthetic
  source 1..21: mol_type = other DNA
gccaaattcattttttaagag

SEQ ID NO: 13238 - DNA, 21 bp, synthetic construct
  misc_feature 1..21: note = Synthetic
  source 1..21: mol_type = other DNA
gccaacaagttgacatcggaa

SEQ ID NO: 13239 - DNA, 21 bp, synthetic construct
  misc_feature 1..21: note = Synthetic
  source 1..21: mol_type = other DNA
gccaacttcatcgctcatgtc

SEQ ID NO: 13240 - DNA, 21 bp, synthetic construct
  misc_feature 1..21: note = Synthetic
  source 1..21: mol_type = other DNA
gccaaggagaaggggtgggcc

SEQ ID NO: 13241 - DNA, 21 bp, synthetic construct
  misc_feature 1..21: note = Synthetic
  source 1..21: mol_type = other DNA
gccaaggtaaccgggtgtctc

SEQ ID NO: 13242 - DNA, 21 bp, synthetic construct
  misc_feature 1..21: note = Synthetic
  source 1..21: mol_type = other DNA
gccaatcccttgtgacatctt

SEQ ID NO: 13243 - DNA, 21 bp, synthetic construct
  misc_feature 1..21: note = Synthetic
  source 1..21: mol_type = other DNA
gccacacctgggtgcaggcca

SEQ ID NO: 13244 - DNA, 21 bp, synthetic construct
  misc_feature 1..21: note = Synthetic
  source 1..21: mol_type = other DNA
gccacagagcacagcggaaac

SEQ ID NO: 13245 - DNA, 21 bp, synthetic construct
  misc_feature 1..21: note = Synthetic
  source 1..21: mol_type = other DNA
gccacagcgcagttttcctcg

SEQ ID NO: 13246 - DNA, 21 bp, synthetic construct
  misc_feature 1..21: note = Synthetic
  source 1..21: mol_type = other DNA
gccacaggacagccttgctcg

SEQ ID NO: 13247 - DNA, 21 bp, synthetic construct
  misc_feature 1..21: note = Synthetic
  source 1..21: mol_type = other DNA
gccaccacgcccggctaattt

SEQ ID NO: 13248 - DNA, 21 bp, synthetic construct
  misc_feature 1..21: note = Synthetic
  source 1..21: mol_type = other DNA
gccaccacggattcagccaga

SEQ ID NO: 13249 - DNA, 21 bp, synthetic construct
  misc_feature 1..21: note = Synthetic
  source 1..21: mol_type = other DNA
gccaccagctggaagccgtcg

SEQ ID NO: 13250 - DNA, 21 bp, synthetic construct
  misc_feature 1..21: note = Synthetic
  source 1..21: mol_type = other DNA
gccaccatcacagcgccagct

SEQ ID NO: 13251 - DNA, 21 bp, synthetic construct
  misc_feature 1..21: note = Synthetic
  source 1..21: mol_type = other DNA
gccaccctccaggttcacgca

SEQ ID NO: 13252 - DNA, 21 bp, synthetic construct
  misc_feature 1..21: note = Synthetic
  source 1..21: mol_type = other DNA
gccaccgtacccagctgattt

SEQ ID NO: 13253 - DNA, 21 bp, synthetic construct
  misc_feature 1..21: note = Synthetic
  source 1..21: mol_type = other DNA
gccacctccgtgtccagagcg

SEQ ID NO: 13254 - DNA, 21 bp, synthetic construct
  misc_feature 1..21: note = Synthetic
  source 1..21: mol_type = other DNA
gccacgtcatcctccagactg

SEQ ID NO: 13255 - DNA, 21 bp, synthetic construct
  misc_feature 1..21: note = Synthetic
  source 1..21: mol_type = other DNA
gccacgtgtcctcacggccaa

SEQ ID NO: 13256 - DNA, 21 bp, synthetic construct
  misc_feature 1..21: note = Synthetic
  source 1..21: mol_type = other DNA
gccactcatacatacaacggg

SEQ ID NO: 13257 - DNA, 21 bp, synthetic construct
  misc_feature 1..21: note = Synthetic
  source 1..21: mol_type = other DNA
gccactcatccgagccatctt

SEQ ID NO: 13258 - DNA, 21 bp, synthetic construct
  misc_feature 1..21: note = Synthetic
  source 1..21: mol_type = other DNA
gccactgaatgttttcagtca

SEQ ID NO: 13259 - DNA, 21 bp, synthetic construct
  misc_feature 1..21: note = Synthetic
  source 1..21: mol_type = other DNA
gccactgaggagatctagggt

SEQ ID NO: 13260 - DNA, 21 bp, synthetic construct
  misc_feature 1..21: note = Synthetic
  source 1..21: mol_type = other DNA
gccactgcagcctcagcctct

SEQ ID NO: 13261 - DNA, 21 bp, synthetic construct
  misc_feature 1..21: note = Synthetic
  source 1..21: mol_type = other DNA
gccactgcgcccggcctcacc

SEQ ID NO: 13262 - DNA, 21 bp, synthetic construct
  misc_feature 1..21: note = Synthetic
  source 1..21: mol_type = other DNA
gccacttaggcagtggaactc

SEQ ID NO: 13263 - DNA, 21 bp, synthetic construct
  misc_feature 1..21: note = Synthetic
  source 1..21: mol_type = other DNA
gccacttgcttctctgggcct

SEQ ID NO: 13264 - DNA, 21 bp, synthetic construct
  misc_feature 1..21: note = Synthetic
  source 1..21: mol_type = other DNA
gccagactgcggactgcagtg

SEQ ID NO: 13265 - DNA, 21 bp, synthetic construct
  misc_feature 1..21: note = Synthetic
  source 1..21: mol_type = other DNA
gccagaggccatgggctgctg

SEQ ID NO: 13266 - DNA, 21 bp, synthetic construct
  misc_feature 1..21: note = Synthetic
  source 1..21: mol_type = other DNA
gccagatcatttccgacgcca

SEQ ID NO: 13267 - DNA, 21 bp, synthetic construct
  misc_feature 1..21: note = Synthetic
  source 1..21: mol_type = other DNA
gccagcaacgtcgcccagagc

SEQ ID NO: 13268 - DNA, 21 bp, synthetic construct
  misc_feature 1..21: note = Synthetic
  source 1..21: mol_type = other DNA
gccagcagcatgccgtccggg

SEQ ID NO: 13269 - DNA, 21 bp, synthetic construct
  misc_feature 1..21: note = Synthetic
  source 1..21: mol_type = other DNA
gccagcccgtcgggggcctgg

SEQ ID NO: 13270 - DNA, 21 bp, synthetic construct
  misc_feature 1..21: note = Synthetic
  source 1..21: mol_type = other DNA
gccagcctcttttcatcctcc

SEQ ID NO: 13271 - DNA, 21 bp, synthetic construct
  misc_feature 1..21: note = Synthetic
  source 1..21: mol_type = other DNA
gccagctggagtggatgcact

SEQ ID NO: 13272 - DNA, 21 bp, synthetic construct
  misc_feature 1..21: note = Synthetic
  source 1..21: mol_type = other DNA
gccaggagggcccaggataac

SEQ ID NO: 13273 - DNA, 21 bp, synthetic construct
  misc_feature 1..21: note = Synthetic
  source 1..21: mol_type = other DNA
gccaggatggtctcgatctcc

SEQ ID NO: 13274 - DNA, 21 bp, synthetic construct
  misc_feature 1..21: note = Synthetic
  source 1..21: mol_type = other DNA
gccaggcagtgtcccgacccg

SEQ ID NO: 13275 - DNA, 21 bp, synthetic construct
  misc_feature 1..21: note = Synthetic
  source 1..21: mol_type = other DNA
gccagggggtcccgttggtgc

SEQ ID NO: 13276 - DNA, 21 bp, synthetic construct
  misc_feature 1..21: note = Synthetic
  source 1..21: mol_type = other DNA
gccagttcttccatagaagga

SEQ ID NO: 13277 - DNA, 21 bp, synthetic construct
  misc_feature 1..21: note = Synthetic
  source 1..21: mol_type = other DNA
gccatcctggcactcagcgct

SEQ ID NO: 13278 - DNA, 21 bp, synthetic construct
  misc_feature 1..21: note = Synthetic
  source 1..21: mol_type = other DNA
gccatcgcacctccagaactg

SEQ ID NO: 13279 - DNA, 21 bp, synthetic construct
  misc_feature 1..21: note = Synthetic
  source 1..21: mol_type = other DNA
gccatcgcagacccacttgta

SEQ ID NO: 13280 - DNA, 21 bp, synthetic construct
  misc_feature 1..21: note = Synthetic
  source 1..21: mol_type = other DNA
gccatctgctgttgtgtgttg

SEQ ID NO: 13281 - DNA, 21 bp, synthetic construct
  misc_feature 1..21: note = Synthetic
  source 1..21: mol_type = other DNA
gccatcttcgcagtcggggtc

SEQ ID NO: 13282 - DNA, 21 bp, synthetic construct
  misc_feature 1..21: note = Synthetic
  source 1..21: mol_type = other DNA
gccatgaacaggatccaccac

SEQ ID NO: 13283 - DNA, 21 bp, synthetic construct
  misc_feature 1..21: note = Synthetic
  source 1..21: mol_type = other DNA
gccatgaatccctttcctggc

SEQ ID NO: 13284 - DNA, 21 bp, synthetic construct
  misc_feature 1..21: note = Synthetic
  source 1..21: mol_type = other DNA
gccatgcctggccagaggcca

SEQ ID NO: 13285 - DNA, 21 bp, synthetic construct
  misc_feature 1..21: note = Synthetic
  source 1..21: mol_type = other DNA
gccatggatgcagtttccatc

SEQ ID NO: 13286 - DNA, 21 bp, synthetic construct
  misc_feature 1..21: note = Synthetic
  source 1..21: mol_type = other DNA
gccatgggctgctgatgcacc

SEQ ID NO: 13287 - DNA, 21 bp, synthetic construct
  misc_feature 1..21: note = Synthetic
  source 1..21: mol_type = other DNA
gccatgttgcagactttgtcc

SEQ ID NO: 13288 - DNA, 21 bp, synthetic construct
  misc_feature 1..21: note = Synthetic
  source 1..21: mol_type = other DNA
gccattgcatgggcactgtcc

SEQ ID NO: 13289 - DNA, 21 bp, synthetic construct
  misc_feature 1..21: note = Synthetic
  source 1..21: mol_type = other DNA
gccattgctcagggtggtcct

SEQ ID NO: 13290 - DNA, 21 bp, synthetic construct
  misc_feature 1..21: note = Synthetic
  source 1..21: mol_type = other DNA
gccattgggccactgaatgtt

SEQ ID NO: 13291 - DNA, 21 bp, synthetic construct
  misc_feature 1..21: note = Synthetic
  source 1..21: mol_type = other DNA
gcccacagccttgcaggcctt

SEQ ID NO: 13292 - DNA, 21 bp, synthetic construct
  misc_feature 1..21: note = Synthetic
  source 1..21: mol_type = other DNA
gcccacagctgggggatgcag

SEQ ID NO: 13293 - DNA, 21 bp, synthetic construct
  misc_feature 1..21: note = Synthetic
  source 1..21: mol_type = other DNA
gcccacgtggctgaagatctc

SEQ ID NO: 13294 - DNA, 21 bp, synthetic construct
  misc_feature 1..21: note = Synthetic
  source 1..21: mol_type = other DNA
gcccactgcagtccccgccgc

SEQ ID NO: 13295 - DNA, 21 bp, synthetic construct
  misc_feature 1..21: note = Synthetic
  source 1..21: mol_type = other DNA
gcccagagcttggtgagacat

SEQ ID NO: 13296 - DNA, 21 bp, synthetic construct
  misc_feature 1..21: note = Synthetic
  source 1..21: mol_type = other DNA
gcccaggacagagtcggtcca

SEQ ID NO: 13297 - DNA, 21 bp, synthetic construct
  misc_feature 1..21: note = Synthetic
  source 1..21: mol_type = other DNA
gcccaggataacggagggcga

SEQ ID NO: 13298 - DNA, 21 bp, synthetic construct
  misc_feature 1..21: note = Synthetic
  source 1..21: mol_type = other DNA
gcccaggccagactgcggact

SEQ ID NO: 13299 - DNA, 21 bp, synthetic construct
  misc_feature 1..21: note = Synthetic
  source 1..21: mol_type = other DNA
gcccaggctggaaagcagtgg

SEQ ID NO: 13300 - DNA, 21 bp, synthetic construct
  misc_feature 1..21: note = Synthetic
  source 1..21: mol_type = other DNA
gcccaggctggagtgcagtgg

SEQ ID NO: 13301 - DNA, 21 bp, synthetic construct
  misc_feature 1..21: note = Synthetic
  source 1..21: mol_type = other DNA
gcccaggggtggccccaggca

SEQ ID NO: 13302 - DNA, 21 bp, synthetic construct
  misc_feature 1..21: note = Synthetic
  source 1..21: mol_type = other DNA
gccccaggcagccgggaggtg

SEQ ID NO: 13303 - DNA, 21 bp, synthetic construct
  misc_feature 1..21: note = Synthetic
  source 1..21: mol_type = other DNA
gccccagggccccatgctcgc

SEQ ID NO: 13304 - DNA, 21 bp, synthetic construct
  misc_feature 1..21: note = Synthetic
  source 1..21: mol_type = other DNA
gccccatgctcgcagcctctg

SEQ ID NO: 13305 - DNA, 21 bp, synthetic construct
  misc_feature 1..21: note = Synthetic
  source 1..21: mol_type = other DNA
gcccccacagctgaagtcccc

SEQ ID NO: 13306 - DNA, 21 bp, synthetic construct
  misc_feature 1..21: note = Synthetic
  source 1..21: mol_type = other DNA
gccccccaggacaaggtgggg

SEQ ID NO: 13307 - DNA, 21 bp, synthetic construct
  misc_feature 1..21: note = Synthetic
  source 1..21: mol_type = other DNA
gcccccgagaccagagaccca

SEQ ID NO: 13308 - DNA, 21 bp, synthetic construct
  misc_feature 1..21: note = Synthetic
  source 1..21: mol_type = other DNA
gcccccgttgacatcgatgct

SEQ ID NO: 13309 - DNA, 21 bp, synthetic construct
  misc_feature 1..21: note = Synthetic
  source 1..21: mol_type = other DNA
gccccctttcttgatcttggc

SEQ ID NO: 13310 - DNA, 21 bp, synthetic construct
  misc_feature 1..21: note = Synthetic
  source 1..21: mol_type = other DNA
gccccgagaatagtcactgaa

SEQ ID NO: 13311 - DNA, 21 bp, synthetic construct
  misc_feature 1..21: note = Synthetic
  source 1..21: mol_type = other DNA
gcccctctctgtccccggcat

SEQ ID NO: 13312 - DNA, 21 bp, synthetic construct
  misc_feature 1..21: note = Synthetic
  source 1..21: mol_type = other DNA
gcccctctgtgaacttgatcg

SEQ ID NO: 13313 - DNA, 21 bp, synthetic construct
  misc_feature 1..21: note = Synthetic
  source 1..21: mol_type = other DNA
gcccgccaccacgcccggcta

SEQ ID NO: 13314 - DNA, 21 bp, synthetic construct
  misc_feature 1..21: note = Synthetic
  source 1..21: mol_type = other DNA
gcccggcctcaccgtgcatgt

SEQ ID NO: 13315 - DNA, 21 bp, synthetic construct
  misc_feature 1..21: note = Synthetic
  source 1..21: mol_type = other DNA
gcccggctaattttttgtatt

SEQ ID NO: 13316 - DNA, 21 bp, synthetic construct
  misc_feature 1..21: note = Synthetic
  source 1..21: mol_type = other DNA
gcccgtcgggggcctggatgt

SEQ ID NO: 13317 - DNA, 21 bp, synthetic construct
  misc_feature 1..21: note = Synthetic
  source 1..21: mol_type = other DNA
gccctcacgctactgggcttc

SEQ ID NO: 13318 - DNA, 21 bp, synthetic construct
  misc_feature 1..21: note = Synthetic
  source 1..21: mol_type = other DNA
gcccttggcttggagccgttc

SEQ ID NO: 13319 - DNA, 21 bp, synthetic construct
  misc_feature 1..21: note = Synthetic
  source 1..21: mol_type = other DNA
gcccttggtatccgcaacaga

SEQ ID NO: 13320 - DNA, 21 bp, synthetic construct
  misc_feature 1..21: note = Synthetic
  source 1..21: mol_type = other DNA
gccgagagatgcacttcccat

SEQ ID NO: 13321 - DNA, 21 bp, synthetic construct
  misc_feature 1..21: note = Synthetic
  source 1..21: mol_type = other DNA
gccgagcaggggctactgtcc

SEQ ID NO: 13322 - DNA, 21 bp, synthetic construct
  misc_feature 1..21: note = Synthetic
  source 1..21: mol_type = other DNA
gccgatcttaaggtcattgca

SEQ ID NO: 13323 - DNA, 21 bp, synthetic construct
  misc_feature 1..21: note = Synthetic
  source 1..21: mol_type = other DNA
gccgccagttcttccatagaa

SEQ ID NO: 13324 - DNA, 21 bp, synthetic construct
  misc_feature 1..21: note = Synthetic
  source 1..21: mol_type = other DNA
gccgccattgctcagggtggt

SEQ ID NO: 13325 - DNA, 21 bp, synthetic construct
  misc_feature 1..21: note = Synthetic
  source 1..21: mol_type = other DNA
gccgccgttgttgtccaagca

SEQ ID NO: 13326 - DNA, 21 bp, synthetic construct
  misc_feature 1..21: note = Synthetic
  source 1..21: mol_type = other DNA
gccgcggcgaggagcaaggcg

SEQ ID NO: 13327 - DNA, 21 bp, synthetic construct
  misc_feature 1..21: note = Synthetic
  source 1..21: mol_type = other DNA
gccgctgtgacacttgaactt

SEQ ID NO: 13328 - DNA, 21 bp, synthetic construct
  misc_feature 1..21: note = Synthetic
  source 1..21: mol_type = other DNA
gccggcgaggtctcaggaagg

SEQ ID NO: 13329 - DNA, 21 bp, synthetic construct
  misc_feature 1..21: note = Synthetic
  source 1..21: mol_type = other DNA
gccggctgccatggatgcagt

SEQ ID NO: 13330 - DNA, 21 bp, synthetic construct
  misc_feature 1..21: note = Synthetic
  source 1..21: mol_type = other DNA
gccgggaggtgtcgggaacag

SEQ ID NO: 13331 - DNA, 21 bp, synthetic construct
  misc_feature 1..21: note = Synthetic
  source 1..21: mol_type = other DNA
gccgggggcccctctgtgaac

SEQ ID NO: 13332 - DNA, 21 bp, synthetic construct
  misc_feature 1..21: note = Synthetic
  source 1..21: mol_type = other DNA
gccggttggtgaagaagaggt

SEQ ID NO: 13333 - DNA, 21 bp, synthetic construct
  misc_feature 1..21: note = Synthetic
  source 1..21: mol_type = other DNA
gccgtccaagcagtcccggtc

SEQ ID NO: 13334 - DNA, 21 bp, synthetic construct
  misc_feature 1..21: note = Synthetic
  source 1..21: mol_type = other DNA
gccgtccgggcaggcgcaggt

SEQ ID NO: 13335 - DNA, 21 bp, synthetic construct
  misc_feature 1..21: note = Synthetic
  source 1..21: mol_type = other DNA
gccgtcctggttgtggcaaat

SEQ ID NO: 13336 - DNA, 21 bp, synthetic construct
  misc_feature 1..21: note = Synthetic
  source 1..21: mol_type = other DNA
gccgtcggggcacaggcactc

SEQ ID NO: 13337 - DNA, 21 bp, synthetic construct
  misc_feature 1..21: note = Synthetic
  source 1..21: mol_type = other DNA
gccgtgggctctgtcaagctg

SEQ ID NO: 13338 - DNA, 21 bp, synthetic construct
  misc_feature 1..21: note = Synthetic
  source 1..21: mol_type = other DNA
gccgttctccctgaataacgt

SEQ ID NO: 13339 - DNA, 21 bp, synthetic construct
  misc_feature 1..21: note = Synthetic
  source 1..21: mol_type = other DNA
gccgttgtcgcagtccacttg

SEQ ID NO: 13340 - DNA, 21 bp, synthetic construct
  misc_feature 1..21: note = Synthetic
  source 1..21: mol_type = other DNA
gccgttgttgtccaagcattc

SEQ ID NO: 13341 - DNA, 21 bp, synthetic construct
  misc_feature 1..21: note = Synthetic
  source 1..21: mol_type = other DNA
gcctcaaatgcctgagctcaa

SEQ ID NO: 13342 - DNA, 21 bp, synthetic construct
  misc_feature 1..21: note = Synthetic
  source 1..21: mol_type = other DNA
gcctcaccgtgcatgttttaa

SEQ ID NO: 13343 - DNA, 21 bp, synthetic construct
  misc_feature 1..21: note = Synthetic
  source 1..21: mol_type = other DNA
gcctcagcctcccaagtagct

SEQ ID NO: 13344 - DNA, 21 bp, synthetic construct
  misc_feature 1..21: note = Synthetic
  source 1..21: mol_type = other DNA
gcctcagcctcccgagtagct

SEQ ID NO: 13345 - DNA, 21 bp, synthetic construct
  misc_feature 1..21: note = Synthetic
  source 1..21: mol_type = other DNA
gcctcagcctctcttggctgg

SEQ ID NO: 13346 - DNA, 21 bp, synthetic construct
  misc_feature 1..21: note = Synthetic
  source 1..21: mol_type = other DNA
gcctcagcctctgtgaggcag

SEQ ID NO: 13347 - DNA, 21 bp, synthetic construct
  misc_feature 1..21: note = Synthetic
  source 1..21: mol_type = other DNA
gcctcccaaagtgctgggatt

SEQ ID NO: 13348 - DNA, 21 bp, synthetic construct
  misc_feature 1..21: note = Synthetic
  source 1..21: mol_type = other DNA
gcctcccaagtagctgggatc

SEQ ID NO: 13349 - DNA, 21 bp, synthetic construct
  misc_feature 1..21: note = Synthetic
  source 1..21: mol_type = other DNA
gcctcccagatgaataaatat

SEQ ID NO: 13350 - DNA, 21 bp, synthetic construct
  misc_feature 1..21: note = Synthetic
  source 1..21: mol_type = other DNA
gcctcccgagtagctgggact

SEQ ID NO: 13351 - DNA, 21 bp, synthetic construct
  misc_feature 1..21: note = Synthetic
  source 1..21: mol_type = other DNA
gcctcgccatgcctggccaga

SEQ ID NO: 13352 - DNA, 21 bp, synthetic construct
  misc_feature 1..21: note = Synthetic
  source 1..21: mol_type = other DNA
gcctcggcctcccaaagtgct

SEQ ID NO: 13353 - DNA, 21 bp, synthetic construct
  misc_feature 1..21: note = Synthetic
  source 1..21: mol_type = other DNA
gcctcgtctgagccgtccaag

SEQ ID NO: 13354 - DNA, 21 bp, synthetic construct
  misc_feature 1..21: note = Synthetic
  source 1..21: mol_type = other DNA
gcctctcttggctgggtgagg

SEQ ID NO: 13355 - DNA, 21 bp, synthetic construct
  misc_feature 1..21: note = Synthetic
  source 1..21: mol_type = other DNA
gcctctgccaggcagtgtccc

SEQ ID NO: 13356 - DNA, 21 bp, synthetic construct
  misc_feature 1..21: note = Synthetic
  source 1..21: mol_type = other DNA
gcctctgggaagtggcatcat

SEQ ID NO: 13357 - DNA, 21 bp, synthetic construct
  misc_feature 1..21: note = Synthetic
  source 1..21: mol_type = other DNA
gcctctgtgaggcagctcctc

SEQ ID NO: 13358 - DNA, 21 bp, synthetic construct
  misc_feature 1..21: note = Synthetic
  source 1..21: mol_type = other DNA
gcctcttttcatcctccaaga

SEQ ID NO: 13359 - DNA, 21 bp, synthetic construct
  misc_feature 1..21: note = Synthetic
  source 1..21: mol_type = other DNA
gcctgacatcccctccccttt

SEQ ID NO: 13360 - DNA, 21 bp, synthetic construct
  misc_feature 1..21: note = Synthetic
  source 1..21: mol_type = other DNA
gcctgacggtggatgtctcct

SEQ ID NO: 13361 - DNA, 21 bp, synthetic construct
  misc_feature 1..21: note = Synthetic
  source 1..21: mol_type = other DNA
gcctgagctcaaaccatcctc

SEQ ID NO: 13362 - DNA, 21 bp, synthetic construct
  misc_feature 1..21: note = Synthetic
  source 1..21: mol_type = other DNA
gcctggatgtctctgctgatg

SEQ ID NO: 13363 - DNA, 21 bp, synthetic construct
  misc_feature 1..21: note = Synthetic
  source 1..21: mol_type = other DNA
gcctggccagaggccatgggc

SEQ ID NO: 13364 - DNA, 21 bp, synthetic construct
  misc_feature 1..21: note = Synthetic
  source 1..21: mol_type = other DNA
gcctgggatcccatcccaaca

SEQ ID NO: 13365 - DNA, 21 bp, synthetic construct
  misc_feature 1..21: note = Synthetic
  source 1..21: mol_type = other DNA
gcctggtctccaactcctgaa

SEQ ID NO: 13366 - DNA, 21 bp, synthetic construct
  misc_feature 1..21: note = Synthetic
  source 1..21: mol_type = other DNA
gcctgttctgcctcccagatg

SEQ ID NO: 13367 - DNA, 21 bp, synthetic construct
  misc_feature 1..21: note = Synthetic
  source 1..21: mol_type = other DNA
gcctgtttctcttatccttca

SEQ ID NO: 13368 - DNA, 21 bp, synthetic construct
  misc_feature 1..21: note = Synthetic
  source 1..21: mol_type = other DNA
gccttcctcacactggcactt

SEQ ID NO: 13369 - DNA, 21 bp, synthetic construct
  misc_feature 1..21: note = Synthetic
  source 1..21: mol_type = other DNA
gccttcgtgtgggggtccagc

SEQ ID NO: 13370 - DNA, 21 bp, synthetic construct
  misc_feature 1..21: note = Synthetic
  source 1..21: mol_type = other DNA
gccttgagggtggccgggggc

SEQ ID NO: 13371 - DNA, 21 bp, synthetic construct
  misc_feature 1..21: note = Synthetic
  source 1..21: mol_type = other DNA
gccttgcaggccttcgtgtgg

SEQ ID NO: 13372 - DNA, 21 bp, synthetic construct
  misc_feature 1..21: note = Synthetic
  source 1..21: mol_type = other DNA
gccttgctcgtctgagccgtt

SEQ ID NO: 13373 - DNA, 21 bp, synthetic construct
  misc_feature 1..21: note = Synthetic
  source 1..21: mol_type = other DNA
gcctttgtgacaggaaccgcg

SEQ ID NO: 13374 - DNA, 21 bp, synthetic construct
  misc_feature 1..21: note = Synthetic
  source 1..21: mol_type = other DNA
gcgaaactcgtcctgggagca

SEQ ID NO: 13375 - DNA, 21 bp, synthetic construct
  misc_feature 1..21: note = Synthetic
  source 1..21: mol_type = other DNA
gcgacaggtggccacagcgca

SEQ ID NO: 13376 - DNA, 21 bp, synthetic construct
  misc_feature 1..21: note = Synthetic
  source 1..21: mol_type = other DNA
gcgacaggtggccacaggaca

SEQ ID NO: 13377 - DNA, 21 bp, synthetic construct
  misc_feature 1..21: note = Synthetic
  source 1..21: mol_type = other DNA
gcgaccacgttcctcaggttg

SEQ ID NO: 13378 - DNA, 21 bp, synthetic construct
  misc_feature 1..21: note = Synthetic
  source 1..21: mol_type = other DNA
gcgacggtccagcgcaatttc

SEQ ID NO: 13379 - DNA, 21 bp, synthetic construct
  misc_feature 1..21: note = Synthetic
  source 1..21: mol_type = other DNA
gcgactcgtgtatgtcgcgga

SEQ ID NO: 13380 - DNA, 21 bp, synthetic construct
  misc_feature 1..21: note = Synthetic
  source 1..21: mol_type = other DNA
gcgaggagcaaggcgacggtc

SEQ ID NO: 13381 - DNA, 21 bp, synthetic construct
  misc_feature 1..21: note = Synthetic
  source 1..21: mol_type = other DNA
gcgagggcgccccccaggaca

SEQ ID NO: 13382 - DNA, 21 bp, synthetic construct
  misc_feature 1..21: note = Synthetic
  source 1..21: mol_type = other DNA
gcgaggtctcaggaagggttc

SEQ ID NO: 13383 - DNA, 21 bp, synthetic construct
  misc_feature 1..21: note = Synthetic
  source 1..21: mol_type = other DNA
gcgagtagatgtccacaccat

SEQ ID NO: 13384 - DNA, 21 bp, synthetic construct
  misc_feature 1..21: note = Synthetic
  source 1..21: mol_type = other DNA
gcgagtgggggttgatctgcg

SEQ ID NO: 13385 - DNA, 21 bp, synthetic construct
  misc_feature 1..21: note = Synthetic
  source 1..21: mol_type = other DNA
gcgatcctcctgcctcagcct

SEQ ID NO: 13386 - DNA, 21 bp, synthetic construct
  misc_feature 1..21: note = Synthetic
  source 1..21: mol_type = other DNA
gcgatggagcccacagccttg

SEQ ID NO: 13387 - DNA, 21 bp, synthetic construct
  misc_feature 1..21: note = Synthetic
  source 1..21: mol_type = other DNA
gcgatggggaggacaatggac

SEQ ID NO: 13388 - DNA, 21 bp, synthetic construct
  misc_feature 1..21: note = Synthetic
  source 1..21: mol_type = other DNA
gcgatttcagaaagaacctga

SEQ ID NO: 13389 - DNA, 21 bp, synthetic construct
  misc_feature 1..21: note = Synthetic
  source 1..21: mol_type = other DNA
gcgcaatctcggctcactgca

SEQ ID NO: 13390 - DNA, 21 bp, synthetic construct
  misc_feature 1..21: note = Synthetic
  source 1..21: mol_type = other DNA
gcgcaatttccagccccaggg

SEQ ID NO: 13391 - DNA, 21 bp, synthetic construct
  misc_feature 1..21: note = Synthetic
  source 1..21: mol_type = other DNA
gcgcaggtaaacttgggcgag

SEQ ID NO: 13392 - DNA, 21 bp, synthetic construct
  misc_feature 1..21: note = Synthetic
  source 1..21: mol_type = other DNA
gcgcagttttcctcgtcagat

SEQ ID NO: 13393 - DNA, 21 bp, synthetic construct
  misc_feature 1..21: note = Synthetic
  source 1..21: mol_type = other DNA
gcgccagctggagtggatgca

SEQ ID NO: 13394 - DNA, 21 bp, synthetic construct
  misc_feature 1..21: note = Synthetic
  source 1..21: mol_type = other DNA
gcgccccccaggacaaggtgg

SEQ ID NO: 13395 - DNA, 21 bp, synthetic construct
  misc_feature 1..21: note = Synthetic
  source 1..21: mol_type = other DNA
gcgcccggcctcaccgtgcat

SEQ ID NO: 13396 - DNA, 21 bp, synthetic construct
  misc_feature 1..21: note = Synthetic
  source 1..21: mol_type = other DNA
gcgctgccatcgcagacccac

SEQ ID NO: 13397 - DNA, 21 bp, synthetic construct
  misc_feature 1..21: note = Synthetic
  source 1..21: mol_type = other DNA
gcgctgcggccactcatccga

SEQ ID NO: 13398 - DNA, 21 bp, synthetic construct
  misc_feature 1..21: note = Synthetic
  source 1..21: mol_type = other DNA
gcggaaaccggggacttcgcc

SEQ ID NO: 13399 - DNA, 21 bp, synthetic construct
  misc_feature 1..21: note = Synthetic
  source 1..21: mol_type = other DNA
gcggacataaagacgacaatg

SEQ ID NO: 13400 - DNA, 21 bp, synthetic construct
  misc_feature 1..21: note = Synthetic
  source 1..21: mol_type = other DNA
gcggactgcagtggcgcaatc

SEQ ID NO: 13401 - DNA, 21 bp, synthetic construct
  misc_feature 1..21: note = Synthetic
  source 1..21: mol_type = other DNA
gcggaggaacgccaggcctcc

SEQ ID NO: 13402 - DNA, 21 bp, synthetic construct
  misc_feature 1..21: note = Synthetic
  source 1..21: mol_type = other DNA
gcggaggcggctccggggacc

SEQ ID NO: 13403 - DNA, 21 bp, synthetic construct
  misc_feature 1..21: note = Synthetic
  source 1..21: mol_type = other DNA
gcggccactcatccgagccat

SEQ ID NO: 13404 - DNA, 21 bp, synthetic construct
  misc_feature 1..21: note = Synthetic
  source 1..21: mol_type = other DNA
gcggccactgaggagatctag

SEQ ID NO: 13405 - DNA, 21 bp, synthetic construct
  misc_feature 1..21: note = Synthetic
  source 1..21: mol_type = other DNA
gcggcgaggagcaaggcgacg

SEQ ID NO: 13406 - DNA, 21 bp, synthetic construct
  misc_feature 1..21: note = Synthetic
  source 1..21: mol_type = other DNA
gcggctccggggacccgggac

SEQ ID NO: 13407 - DNA, 21 bp, synthetic construct
  misc_feature 1..21: note = Synthetic
  source 1..21: mol_type = other DNA
gcgggaccacaggtgagcacc

SEQ ID NO: 13408 - DNA, 21 bp, synthetic construct
  misc_feature 1..21: note = Synthetic
  source 1..21: mol_type = other DNA
gcgggagtctgacggaggctg

SEQ ID NO: 13409 - DNA, 21 bp, synthetic construct
  misc_feature 1..21: note = Synthetic
  source 1..21: mol_type = other DNA
gcgggagttccccagtcagtc

SEQ ID NO: 13410 - DNA, 21 bp, synthetic construct
  misc_feature 1..21: note = Synthetic
  source 1..21: mol_type = other DNA
gcggggagattctgaggcaac

SEQ ID NO: 13411 - DNA, 21 bp, synthetic construct
  misc_feature 1..21: note = Synthetic
  source 1..21: mol_type = other DNA
gcggggcagggaggcacagat

SEQ ID NO: 13412 - DNA, 21 bp, synthetic construct
  misc_feature 1..21: note = Synthetic
  source 1..21: mol_type = other DNA
gcggttgacacggcccccaca

SEQ ID NO: 13413 - DNA, 21 bp, synthetic construct
  misc_feature 1..21: note = Synthetic
  source 1..21: mol_type = other DNA
gcggttggcactgaaaatggc

SEQ ID NO: 13414 - DNA, 21 bp, synthetic construct
  misc_feature 1..21: note = Synthetic
  source 1..21: mol_type = other DNA
gcgtcatcttcctgacctcgt

SEQ ID NO: 13415 - DNA, 21 bp, synthetic construct
  misc_feature 1..21: note = Synthetic
  source 1..21: mol_type = other DNA
gcgtgagccactgcgcccggc

SEQ ID NO: 13416 - DNA, 21 bp, synthetic construct
  misc_feature 1..21: note = Synthetic
  source 1..21: mol_type = other DNA
gcgtgaggcacctgtgtctgg

SEQ ID NO: 13417 - DNA, 21 bp, synthetic construct
  misc_feature 1..21: note = Synthetic
  source 1..21: mol_type = other DNA
gcgttgcacacagtccagttc

SEQ ID NO: 13418 - DNA, 21 bp, synthetic construct
  misc_feature 1..21: note = Synthetic
  source 1..21: mol_type = other DNA
gctaacctggctgtctagcaa

SEQ ID NO: 13419 - DNA, 21 bp, synthetic construct
  misc_feature 1..21: note = Synthetic
  source 1..21: mol_type = other DNA
gctaattttttgtatttttag

SEQ ID NO: 13420 - DNA, 21 bp, synthetic construct
  misc_feature 1..21: note = Synthetic
  source 1..21: mol_type = other DNA
gctacaaaaaccttctataca

SEQ ID NO: 13421 - DNA, 21 bp, synthetic construct
  misc_feature 1..21: note = Synthetic
  source 1..21: mol_type = other DNA
gctactgggcttcttctcatt

SEQ ID NO: 13422 - DNA, 21 bp, synthetic construct
  misc_feature 1..21: note = Synthetic
  source 1..21: mol_type = other DNA
gctactgtccccttggaacac

SEQ ID NO: 13423 - DNA, 21 bp, synthetic construct
  misc_feature 1..21: note = Synthetic
  source 1..21: mol_type = other DNA
gctcaaaccatcctcccacct

SEQ ID NO: 13424 - DNA, 21 bp, synthetic construct
  misc_feature 1..21: note = Synthetic
  source 1..21: mol_type = other DNA
gctcacgacagcctcaaatgc

SEQ ID NO: 13425 - DNA, 21 bp, synthetic construct
  misc_feature 1..21: note = Synthetic
  source 1..21: mol_type = other DNA
gctcactgcaacctccacctc

SEQ ID NO: 13426 - DNA, 21 bp, synthetic construct
  misc_feature 1..21: note = Synthetic
  source 1..21: mol_type = other DNA
gctcactgcaagctccgcttc

SEQ ID NO: 13427 - DNA, 21 bp, synthetic construct
  misc_feature 1..21: note = Synthetic
  source 1..21: mol_type = other DNA
gctcagcctcccaaagtgctg

SEQ ID NO: 13428 - DNA, 21 bp, synthetic construct
  misc_feature 1..21: note = Synthetic
  source 1..21: mol_type = other DNA
gctcaggcctggtctccaact

SEQ ID NO: 13429 - DNA, 21 bp, synthetic construct
  misc_feature 1..21: note = Synthetic
  source 1..21: mol_type = other DNA
gctcaggcgatcctcctgcct

SEQ ID NO: 13430 - DNA, 21 bp, synthetic construct
  misc_feature 1..21: note = Synthetic
  source 1..21: mol_type = other DNA
gctcagggtggtcctctcaca

SEQ ID NO: 13431 - DNA, 21 bp, synthetic construct
  misc_feature 1..21: note = Synthetic
  source 1..21: mol_type = other DNA
gctcatgtccttgcagtcata

SEQ ID NO: 13432 - DNA, 21 bp, synthetic construct
  misc_feature 1..21: note = Synthetic
  source 1..21: mol_type = other DNA
gctccgaaaccagaaaggctt

SEQ ID NO: 13433 - DNA, 21 bp, synthetic construct
  misc_feature 1..21: note = Synthetic
  source 1..21: mol_type = other DNA
gctccgcttcccgggttcaca

SEQ ID NO: 13434 - DNA, 21 bp, synthetic construct
  misc_feature 1..21: note = Synthetic
  source 1..21: mol_type = other DNA
gctccggggacccgggacttg

SEQ ID NO: 13435 - DNA, 21 bp, synthetic construct
  misc_feature 1..21: note = Synthetic
  source 1..21: mol_type = other DNA
gctccggtccagcgtcatctt

SEQ ID NO: 13436 - DNA, 21 bp, synthetic construct
  misc_feature 1..21: note = Synthetic
  source 1..21: mol_type = other DNA
gctccgtggcgatggggagga

SEQ ID NO: 13437 - DNA, 21 bp, synthetic construct
  misc_feature 1..21: note = Synthetic
  source 1..21: mol_type = other DNA
gctcctcatgtccctggccag

SEQ ID NO: 13438 - DNA, 21 bp, synthetic construct
  misc_feature 1..21: note = Synthetic
  source 1..21: mol_type = other DNA
gctcgatcatggctcactgca

SEQ ID NO: 13439 - DNA, 21 bp, synthetic construct
  misc_feature 1..21: note = Synthetic
  source 1..21: mol_type = other DNA
gctcgcagcctctgccaggca

SEQ ID NO: 13440 - DNA, 21 bp, synthetic construct
  misc_feature 1..21: note = Synthetic
  source 1..21: mol_type = other DNA
gctcgtctgagccgttgtcgc

SEQ ID NO: 13441 - DNA, 21 bp, synthetic construct
  misc_feature 1..21: note = Synthetic
  source 1..21: mol_type = other DNA
gctctgcctctgggaagtggc

SEQ ID NO: 13442 - DNA, 21 bp, synthetic construct
  misc_feature 1..21: note = Synthetic
  source 1..21: mol_type = other DNA
gctctggcaggcaatgctttg

SEQ ID NO: 13443 - DNA, 21 bp, synthetic construct
  misc_feature 1..21: note = Synthetic
  source 1..21: mol_type = other DNA
gctctgtcaagctgggtgctg

SEQ ID NO: 13444 - DNA, 21 bp, synthetic construct
  misc_feature 1..21: note = Synthetic
  source 1..21: mol_type = other DNA
gctctgtcacacagctgcccc

SEQ ID NO: 13445 - DNA, 21 bp, synthetic construct
  misc_feature 1..21: note = Synthetic
  source 1..21: mol_type = other DNA
gctctgtcgcccaggccagac

SEQ ID NO: 13446 - DNA, 21 bp, synthetic construct
  misc_feature 1..21: note = Synthetic
  source 1..21: mol_type = other DNA
gctgaagatctcggctgcaga

SEQ ID NO: 13447 - DNA, 21 bp, synthetic construct
  misc_feature 1..21: note = Synthetic
  source 1..21: mol_type = other DNA
gctgaagtccccggatttgca

SEQ ID NO: 13448 - DNA, 21 bp, synthetic construct
  misc_feature 1..21: note = Synthetic
  source 1..21: mol_type = other DNA
gctgacctttagcctgacggt

SEQ ID NO: 13449 - DNA, 21 bp, synthetic construct
  misc_feature 1..21: note = Synthetic
  source 1..21: mol_type = other DNA
gctgatgacggtgtcatagga

SEQ ID NO: 13450 - DNA, 21 bp, synthetic construct
  misc_feature 1..21: note = Synthetic
  source 1..21: mol_type = other DNA
gctgatgcaccatgcatggtt

SEQ ID NO: 13451 - DNA, 21 bp, synthetic construct
  misc_feature 1..21: note = Synthetic
  source 1..21: mol_type = other DNA
gctgatttttaactttttggt

SEQ ID NO: 13452 - DNA, 21 bp, synthetic construct
  misc_feature 1..21: note = Synthetic
  source 1..21: mol_type = other DNA
gctgcagaccaaggaggggcg

SEQ ID NO: 13453 - DNA, 21 bp, synthetic construct
  misc_feature 1..21: note = Synthetic
  source 1..21: mol_type = other DNA
gctgcagatcattctctggga

SEQ ID NO: 13454 - DNA, 21 bp, synthetic construct
  misc_feature 1..21: note = Synthetic
  source 1..21: mol_type = other DNA
gctgcaggtgtcgggatcctg

SEQ ID NO: 13455 - DNA, 21 bp, synthetic construct
  misc_feature 1..21: note = Synthetic
  source 1..21: mol_type = other DNA
gctgccatcgcagacccactt

SEQ ID NO: 13456 - DNA, 21 bp, synthetic construct
  misc_feature 1..21: note = Synthetic
  source 1..21: mol_type = other DNA
gctgccatggatgcagtttcc

SEQ ID NO: 13457 - DNA, 21 bp, synthetic construct
  misc_feature 1..21: note = Synthetic
  source 1..21: mol_type = other DNA
gctgcccccgagaccagagac

SEQ ID NO: 13458 - DNA, 21 bp, synthetic construct
  misc_feature 1..21: note = Synthetic
  source 1..21: mol_type = other DNA
gctgcggccactcatccgagc

SEQ ID NO: 13459 - DNA, 21 bp, synthetic construct
  misc_feature 1..21: note = Synthetic
  source 1..21: mol_type = other DNA
gctgctgatgcaccatgcatg

SEQ ID NO: 13460 - DNA, 21 bp, synthetic construct
  misc_feature 1..21: note = Synthetic
  source 1..21: mol_type = other DNA
gctggaaaccctggcttcccg

SEQ ID NO: 13461 - DNA, 21 bp, synthetic construct
  misc_feature 1..21: note = Synthetic
  source 1..21: mol_type = other DNA
gctggaaagcagtggcataat

SEQ ID NO: 13462 - DNA, 21 bp, synthetic construct
  misc_feature 1..21: note = Synthetic
  source 1..21: mol_type = other DNA
gctggaagccgtcggggcaca

SEQ ID NO: 13463 - DNA, 21 bp, synthetic construct
  misc_feature 1..21: note = Synthetic
  source 1..21: mol_type = other DNA
gctggaagccttcctcacact

SEQ ID NO: 13464 - DNA, 21 bp, synthetic construct
  misc_feature 1..21: note = Synthetic
  source 1..21: mol_type = other DNA
gctggagtgcagtggctcgat

SEQ ID NO: 13465 - DNA, 21 bp, synthetic construct
  misc_feature 1..21: note = Synthetic
  source 1..21: mol_type = other DNA
gctggagtggatgcactcgcc

SEQ ID NO: 13466 - DNA, 21 bp, synthetic construct
  misc_feature 1..21: note = Synthetic
  source 1..21: mol_type = other DNA
gctggccacctccgtgtccag

SEQ ID NO: 13467 - DNA, 21 bp, synthetic construct
  misc_feature 1..21: note = Synthetic
  source 1..21: mol_type = other DNA
gctggcgggaccacaggtgag

SEQ ID NO: 13468 - DNA, 21 bp, synthetic construct
  misc_feature 1..21: note = Synthetic
  source 1..21: mol_type = other DNA
gctggctgcaggtgtcgggat

SEQ ID NO: 13469 - DNA, 21 bp, synthetic construct
  misc_feature 1..21: note = Synthetic
  source 1..21: mol_type = other DNA
gctgggactacaggtgcccgc

SEQ ID NO: 13470 - DNA, 21 bp, synthetic construct
  misc_feature 1..21: note = Synthetic
  source 1..21: mol_type = other DNA
gctgggatcacaggcacgtgc

SEQ ID NO: 13471 - DNA, 21 bp, synthetic construct
  misc_feature 1..21: note = Synthetic
  source 1..21: mol_type = other DNA
gctgggattacaggcgtgagc

SEQ ID NO: 13472 - DNA, 21 bp, synthetic construct
  misc_feature 1..21: note = Synthetic
  source 1..21: mol_type = other DNA
gctgggattacaggcgtgagg

SEQ ID NO: 13473 - DNA, 21 bp, synthetic construct
  misc_feature 1..21: note = Synthetic
  source 1..21: mol_type = other DNA
gctgggccaccagctggaagc

SEQ ID NO: 13474 - DNA, 21 bp, synthetic construct
  misc_feature 1..21: note = Synthetic
  source 1..21: mol_type = other DNA
gctgggggatgcaggtggagc

SEQ ID NO: 13475 - DNA, 21 bp, synthetic construct
  misc_feature 1..21: note = Synthetic
  source 1..21: mol_type = other DNA
gctgggtgaggttgtggaaga

SEQ ID NO: 13476 - DNA, 21 bp, synthetic construct
  misc_feature 1..21: note = Synthetic
  source 1..21: mol_type = other DNA
gctgggtgctgcagatcattc

SEQ ID NO: 13477 - DNA, 21 bp, synthetic construct
  misc_feature 1..21: note = Synthetic
  source 1..21: mol_type = other DNA
gctggtggggcgagggcgccc

SEQ ID NO: 13478 - DNA, 21 bp, synthetic construct
  misc_feature 1..21: note = Synthetic
  source 1..21: mol_type = other DNA
gctggtgtactcgctccggtc

SEQ ID NO: 13479 - DNA, 21 bp, synthetic construct
  misc_feature 1..21: note = Synthetic
  source 1..21: mol_type = other DNA
gctggtgtcctgacagccaca

SEQ ID NO: 13480 - DNA, 21 bp, synthetic construct
  misc_feature 1..21: note = Synthetic
  source 1..21: mol_type = other DNA
gctgtagccgtcctggttgtg

SEQ ID NO: 13481 - DNA, 21 bp, synthetic construct
  misc_feature 1..21: note = Synthetic
  source 1..21: mol_type = other DNA
gctgtcactgtctctccggac

SEQ ID NO: 13482 - DNA, 21 bp, synthetic construct
  misc_feature 1..21: note = Synthetic
  source 1..21: mol_type = other DNA
gctgtctagcaaggcttgcat

SEQ ID NO: 13483 - DNA, 21 bp, synthetic construct
  misc_feature 1..21: note = Synthetic
  source 1..21: mol_type = other DNA
gctgtgacacttgaacttgtt

SEQ ID NO: 13484 - DNA, 21 bp, synthetic construct
  misc_feature 1..21: note = Synthetic
  source 1..21: mol_type = other DNA
gctgtggagctgacctttagc

SEQ ID NO: 13485 - DNA, 21 bp, synthetic construct
  misc_feature 1..21: note = Synthetic
  source 1..21: mol_type = other DNA
gctgtggatccagtccacagc

SEQ ID NO: 13486 - DNA, 21 bp, synthetic construct
  misc_feature 1..21: note = Synthetic
  source 1..21: mol_type = other DNA
gctgtgtcctagctggaaacc

SEQ ID NO: 13487 - DNA, 21 bp, synthetic construct
  misc_feature 1..21: note = Synthetic
  source 1..21: mol_type = other DNA
gctgtgtccttacggctgtgg

SEQ ID NO: 13488 - DNA, 21 bp, synthetic construct
  misc_feature 1..21: note = Synthetic
  source 1..21: mol_type = other DNA
gctgttgatgttcttaagccg

SEQ ID NO: 13489 - DNA, 21 bp, synthetic construct
  misc_feature 1..21: note = Synthetic
  source 1..21: mol_type = other DNA
gctgttgcactggaagctggc

SEQ ID NO: 13490 - DNA, 21 bp, synthetic construct
  misc_feature 1..21: note = Synthetic
  source 1..21: mol_type = other DNA
gctgttgtgtgttgaaagcca

SEQ ID NO: 13491 - DNA, 21 bp, synthetic construct
  misc_feature 1..21: note = Synthetic
  source 1..21: mol_type = other DNA
gcttaaggaaggtacaaaccc

SEQ ID NO: 13492 - DNA, 21 bp, synthetic construct
  misc_feature 1..21: note = Synthetic
  source 1..21: mol_type = other DNA
gcttagagattggtggatgag

SEQ ID NO: 13493 - DNA, 21 bp, synthetic construct
  misc_feature 1..21: note = Synthetic
  source 1..21: mol_type = other DNA
gcttatcacggttccctgcac

SEQ ID NO: 13494 - DNA, 21 bp, synthetic construct
  misc_feature 1..21: note = Synthetic
  source 1..21: mol_type = other DNA
gcttcccgggttcacaccatt

SEQ ID NO: 13495 - DNA, 21 bp, synthetic construct
  misc_feature 1..21: note = Synthetic
  source 1..21: mol_type = other DNA
gcttcgttgatgatatctgtc

SEQ ID NO: 13496 - DNA, 21 bp, synthetic construct
  misc_feature 1..21: note = Synthetic
  source 1..21: mol_type = other DNA
gcttctctgggcctgacatcc

SEQ ID NO: 13497 - DNA, 21 bp, synthetic construct
  misc_feature 1..21: note = Synthetic
  source 1..21: mol_type = other DNA
gcttcttctcatttcctctgc

SEQ ID NO: 13498 - DNA, 21 bp, synthetic construct
  misc_feature 1..21: note = Synthetic
  source 1..21: mol_type = other DNA
gcttgagatggagtgaagttt

SEQ ID NO: 13499 - DNA, 21 bp, synthetic construct
  misc_feature 1..21: note = Synthetic
  source 1..21: mol_type = other DNA
gcttgcatagaagaggtaaac

SEQ ID NO: 13500 - DNA, 21 bp, synthetic construct
  misc_feature 1..21: note = Synthetic
  source 1..21: mol_type = other DNA
gcttggagccgttctccctga

SEQ ID NO: 13501 - DNA, 21 bp, synthetic construct
  misc_feature 1..21: note = Synthetic
  source 1..21: mol_type = other DNA
gcttggaggcatttgcataga

SEQ ID NO: 13502 - DNA, 21 bp, synthetic construct
  misc_feature 1..21: note = Synthetic
  source 1..21: mol_type = other DNA
gcttggtgagacattgtcact

SEQ ID NO: 13503 - DNA, 21 bp, synthetic construct
  misc_feature 1..21: note = Synthetic
  source 1..21: mol_type = other DNA
gctttccctggcctgggatcc

SEQ ID NO: 13504 - DNA, 21 bp, synthetic construct
  misc_feature 1..21: note = Synthetic
  source 1..21: mol_type = other DNA
gctttgaagtcccggtcaacc

SEQ ID NO: 13505 - DNA, 21 bp, synthetic construct
  misc_feature 1..21: note = Synthetic
  source 1..21: mol_type = other DNA
gctttggtcttctctgtcttt

SEQ ID NO: 13506 - DNA, 21 bp, synthetic construct
  misc_feature 1..21: note = Synthetic
  source 1..21: mol_type = other DNA
gctttgttgctcaggcctggt

SEQ ID NO: 13507 - DNA, 21 bp, synthetic construct
  misc_feature 1..21: note = Synthetic
  source 1..21: mol_type = other DNA
ggaaaccctggcttcccgcga

SEQ ID NO: 13508 - DNA, 21 bp, synthetic construct
  misc_feature 1..21: note = Synthetic
  source 1..21: mol_type = other DNA
ggaaaccggggacttcgccag

SEQ ID NO: 13509 - DNA, 21 bp, synthetic construct
  misc_feature 1..21: note = Synthetic
  source 1..21: mol_type = other DNA
ggaaagcagtggcataatcat

SEQ ID NO: 13510 - DNA, 21 bp, synthetic construct
  misc_feature 1..21: note = Synthetic
  source 1..21: mol_type = other DNA
ggaaaggaagaaaccaaaatc

SEQ ID NO: 13511 - DNA, 21 bp, synthetic construct
  misc_feature 1..21: note = Synthetic
  source 1..21: mol_type = other DNA
ggaacacgtaaagacccctac

SEQ ID NO: 13512 - DNA, 21 bp, synthetic construct
  misc_feature 1..21: note = Synthetic
  source 1..21: mol_type = other DNA
ggaacagccgccgttgttgtc

SEQ ID NO: 13513 - DNA, 21 bp, synthetic construct
  misc_feature 1..21: note = Synthetic
  source 1..21: mol_type = other DNA
ggaacaggtcgggtggttgtg

SEQ ID NO: 13514 - DNA, 21 bp, synthetic construct
  misc_feature 1..21: note = Synthetic
  source 1..21: mol_type = other DNA
ggaaccgaggccttgagggtg

SEQ ID NO: 13515 - DNA, 21 bp, synthetic construct
  misc_feature 1..21: note = Synthetic
  source 1..21: mol_type = other DNA
ggaaccgcggaggaacgccag

SEQ ID NO: 13516 - DNA, 21 bp, synthetic construct
  misc_feature 1..21: note = Synthetic
  source 1..21: mol_type = other DNA
ggaacctgtgaggcggttggc

SEQ ID NO: 13517 - DNA, 21 bp, synthetic construct
  misc_feature 1..21: note = Synthetic
  source 1..21: mol_type = other DNA
ggaactcgaaggccgagcagg

SEQ ID NO: 13518 - DNA, 21 bp, synthetic construct
  misc_feature 1..21: note = Synthetic
  source 1..21: mol_type = other DNA
ggaactcgtttctttcgcatc

SEQ ID NO: 13519 - DNA, 21 bp, synthetic construct
  misc_feature 1..21: note = Synthetic
  source 1..21: mol_type = other DNA
ggaagaaaccaaaatcccaac

SEQ ID NO: 13520 - DNA, 21 bp, synthetic construct
  misc_feature 1..21: note = Synthetic
  source 1..21: mol_type = other DNA
ggaagacccccaggcaaagga

SEQ ID NO: 13521 - DNA, 21 bp, synthetic construct
  misc_feature 1..21: note = Synthetic
  source 1..21: mol_type = other DNA
ggaagacgaggagcacgatgg

SEQ ID NO: 13522 - DNA, 21 bp, synthetic construct
  misc_feature 1..21: note = Synthetic
  source 1..21: mol_type = other DNA
ggaagacgaggagcactgtag

SEQ ID NO: 13523 - DNA, 21 bp, synthetic construct
  misc_feature 1..21: note = Synthetic
  source 1..21: mol_type = other DNA
ggaagagaaccatatcctctg

SEQ ID NO: 13524 - DNA, 21 bp, synthetic construct
  misc_feature 1..21: note = Synthetic
  source 1..21: mol_type = other DNA
ggaagagacgccgtgggctct

SEQ ID NO: 13525 - DNA, 21 bp, synthetic construct
  misc_feature 1..21: note = Synthetic
  source 1..21: mol_type = other DNA
ggaagcactaggtgggcggac

SEQ ID NO: 13526 - DNA, 21 bp, synthetic construct
  misc_feature 1..21: note = Synthetic
  source 1..21: mol_type = other DNA
ggaagccgtcggggcacaggc

SEQ ID NO: 13527 - DNA, 21 bp, synthetic construct
  misc_feature 1..21: note = Synthetic
  source 1..21: mol_type = other DNA
ggaagccttcctcacactggc

SEQ ID NO: 13528 - DNA, 21 bp, synthetic construct
  misc_feature 1..21: note = Synthetic
  source 1..21: mol_type = other DNA
ggaagctggcgggaccacagg

SEQ ID NO: 13529 - DNA, 21 bp, synthetic construct
  misc_feature 1..21: note = Synthetic
  source 1..21: mol_type = other DNA
ggaagggttctgggcagggac

SEQ ID NO: 13530 - DNA, 21 bp, synthetic construct
  misc_feature 1..21: note = Synthetic
  source 1..21: mol_type = other DNA
ggaaggtacaaacccacctcg

SEQ ID NO: 13531 - DNA, 21 bp, synthetic construct
  misc_feature 1..21: note = Synthetic
  source 1..21: mol_type = other DNA
ggaagtgaatggcttggaggc

SEQ ID NO: 13532 - DNA, 21 bp, synthetic construct
  misc_feature 1..21: note = Synthetic
  source 1..21: mol_type = other DNA
ggaagtggcatcatttggtga

SEQ ID NO: 13533 - DNA, 21 bp, synthetic construct
  misc_feature 1..21: note = Synthetic
  source 1..21: mol_type = other DNA
ggaagtgggtaggggtcggga

SEQ ID NO: 13534 - DNA, 21 bp, synthetic construct
  misc_feature 1..21: note = Synthetic
  source 1..21: mol_type = other DNA
ggaatgcagcggttgacacgg

SEQ ID NO: 13535 - DNA, 21 bp, synthetic construct
  misc_feature 1..21: note = Synthetic
  source 1..21: mol_type = other DNA
ggaatggaagtgggtaggggt

SEQ ID NO: 13536 - DNA, 21 bp, synthetic construct
  misc_feature 1..21: note = Synthetic
  source 1..21: mol_type = other DNA
ggaattcgtcagggcgacagg

SEQ ID NO: 13537 - DNA, 21 bp, synthetic construct
  misc_feature 1..21: note = Synthetic
  source 1..21: mol_type = other DNA
ggacaaggtggggacggaggt

SEQ ID NO: 13538 - DNA, 21 bp, synthetic construct
  misc_feature 1..21: note = Synthetic
  source 1..21: mol_type = other DNA
ggacaatggacagagccctca

SEQ ID NO: 13539 - DNA, 21 bp, synthetic construct
  misc_feature 1..21: note = Synthetic
  source 1..21: mol_type = other DNA
ggacaattgccaatcccttgt

SEQ ID NO: 13540 - DNA, 21 bp, synthetic construct
  misc_feature 1..21: note = Synthetic
  source 1..21: mol_type = other DNA
ggacacagtgttttgtccctg

SEQ ID NO: 13541 - DNA, 21 bp, synthetic construct
  misc_feature 1..21: note = Synthetic
  source 1..21: mol_type = other DNA
ggacagagccctcacgctact

SEQ ID NO: 13542 - DNA, 21 bp, synthetic construct
  misc_feature 1..21: note = Synthetic
  source 1..21: mol_type = other DNA
ggacagagtcggtccagtaga

SEQ ID NO: 13543 - DNA, 21 bp, synthetic construct
  misc_feature 1..21: note = Synthetic
  source 1..21: mol_type = other DNA
ggacagccttgctcgtctgag

SEQ ID NO: 13544 - DNA, 21 bp, synthetic construct
  misc_feature 1..21: note = Synthetic
  source 1..21: mol_type = other DNA
ggacaggtcagaccagtagat

SEQ ID NO: 13545 - DNA, 21 bp, synthetic construct
  misc_feature 1..21: note = Synthetic
  source 1..21: mol_type = other DNA
ggacagtaggttttcagccaa

SEQ ID NO: 13546 - DNA, 21 bp, synthetic construct
  misc_feature 1..21: note = Synthetic
  source 1..21: mol_type = other DNA
ggacataaagacgacaatggc

SEQ ID NO: 13547 - DNA, 21 bp, synthetic construct
  misc_feature 1..21: note = Synthetic
  source 1..21: mol_type = other DNA
ggacatcagtgcaacagtaac

SEQ ID NO: 13548 - DNA, 21 bp, synthetic construct
  misc_feature 1..21: note = Synthetic
  source 1..21: mol_type = other DNA
ggacatcattctcccaaaaag

SEQ ID NO: 13549 - DNA, 21 bp, synthetic construct
  misc_feature 1..21: note = Synthetic
  source 1..21: mol_type = other DNA
ggaccacaggtgagcaccggg

SEQ ID NO: 13550 - DNA, 21 bp, synthetic construct
  misc_feature 1..21: note = Synthetic
  source 1..21: mol_type = other DNA
ggacccgggacttgtcgtcgc

SEQ ID NO: 13551 - DNA, 21 bp, synthetic construct
  misc_feature 1..21: note = Synthetic
  source 1..21: mol_type = other DNA
ggacctcatcctctgtggtct

SEQ ID NO: 13552 - DNA, 21 bp, synthetic construct
  misc_feature 1..21: note = Synthetic
  source 1..21: mol_type = other DNA
ggacgcatttacgtgctccga

SEQ ID NO: 13553 - DNA, 21 bp, synthetic construct
  misc_feature 1..21: note = Synthetic
  source 1..21: mol_type = other DNA
ggacggaggtgtcgccacaga

SEQ ID NO: 13554 - DNA, 21 bp, synthetic construct
  misc_feature 1..21: note = Synthetic
  source 1..21: mol_type = other DNA
ggacgggactccaggcagatg

SEQ ID NO: 13555 - DNA, 21 bp, synthetic construct
  misc_feature 1..21: note = Synthetic
  source 1..21: mol_type = other DNA
ggactacaggtgcccgccacc

SEQ ID NO: 13556 - DNA, 21 bp, synthetic construct
  misc_feature 1..21: note = Synthetic
  source 1..21: mol_type = other DNA
ggactcatcagagccatcctg

SEQ ID NO: 13557 - DNA, 21 bp, synthetic construct
  misc_feature 1..21: note = Synthetic
  source 1..21: mol_type = other DNA
ggactccaggcagatgttcac

SEQ ID NO: 13558 - DNA, 21 bp, synthetic construct
  misc_feature 1..21: note = Synthetic
  source 1..21: mol_type = other DNA
ggactgcagtggcgcaatctc

SEQ ID NO: 13559 - DNA, 21 bp, synthetic construct
  misc_feature 1..21: note = Synthetic
  source 1..21: mol_type = other DNA
ggacttcgccaggagggccca

SEQ ID NO: 13560 - DNA, 21 bp, synthetic construct
  misc_feature 1..21: note = Synthetic
  source 1..21: mol_type = other DNA
ggacttgtcgtcgcctttgtg

SEQ ID NO: 13561 - DNA, 21 bp, synthetic construct
  misc_feature 1..21: note = Synthetic
  source 1..21: mol_type = other DNA
ggagaaggggtgggccagcct

SEQ ID NO: 13562 - DNA, 21 bp, synthetic construct
  misc_feature 1..21: note = Synthetic
  source 1..21: mol_type = other DNA
ggagaccacgggaatggaagt

SEQ ID NO: 13563 - DNA, 21 bp, synthetic construct
  misc_feature 1..21: note = Synthetic
  source 1..21: mol_type = other DNA
ggagagaaactcaaaacttcc

SEQ ID NO: 13564 - DNA, 21 bp, synthetic construct
  misc_feature 1..21: note = Synthetic
  source 1..21: mol_type = other DNA
ggagagaaatggaggtgtcat

SEQ ID NO: 13565 - DNA, 21 bp, synthetic construct
  misc_feature 1..21: note = Synthetic
  source 1..21: mol_type = other DNA
ggagaggcacgctctgtcaca

SEQ ID NO: 13566 - DNA, 21 bp, synthetic construct
  misc_feature 1..21: note = Synthetic
  source 1..21: mol_type = other DNA
ggagatctagggtgatgccat

SEQ ID NO: 13567 - DNA, 21 bp, synthetic construct
  misc_feature 1..21: note = Synthetic
  source 1..21: mol_type = other DNA
ggagatgcatttcccgtcttg

SEQ ID NO: 13568 - DNA, 21 bp, synthetic construct
  misc_feature 1..21: note = Synthetic
  source 1..21: mol_type = other DNA
ggagattctgaggcaacgttt

SEQ ID NO: 13569 - DNA, 21 bp, synthetic construct
  misc_feature 1..21: note = Synthetic
  source 1..21: mol_type = other DNA
ggagcaaggcgacggtccagc

SEQ ID NO: 13570 - DNA, 21 bp, synthetic construct
  misc_feature 1..21: note = Synthetic
  source 1..21: mol_type = other DNA
ggagcacgatggggaggacaa

SEQ ID NO: 13571 - DNA, 21 bp, synthetic construct
  misc_feature 1..21: note = Synthetic
  source 1..21: mol_type = other DNA
ggagcacgtctcctgggactc

SEQ ID NO: 13572 - DNA, 21 bp, synthetic construct
  misc_feature 1..21: note = Synthetic
  source 1..21: mol_type = other DNA
ggagcacgtcttgggggagca

SEQ ID NO: 13573 - DNA, 21 bp, synthetic construct
  misc_feature 1..21: note = Synthetic
  source 1..21: mol_type = other DNA
ggagcacgtcttggggggaca

SEQ ID NO: 13574 - DNA, 21 bp, synthetic construct
  misc_feature 1..21: note = Synthetic
  source 1..21: mol_type = other DNA
ggagcactgtagggagaggca

SEQ ID NO: 13575 - DNA, 21 bp, synthetic construct
  misc_feature 1..21: note = Synthetic
  source 1..21: mol_type = other DNA
ggagcccacagccttgcaggc

SEQ ID NO: 13576 - DNA, 21 bp, synthetic construct
  misc_feature 1..21: note = Synthetic
  source 1..21: mol_type = other DNA
ggagccgttctccctgaataa

SEQ ID NO: 13577 - DNA, 21 bp, synthetic construct
  misc_feature 1..21: note = Synthetic
  source 1..21: mol_type = other DNA
ggagctgacctttagcctgac

SEQ ID NO: 13578 - DNA, 21 bp, synthetic construct
  misc_feature 1..21: note = Synthetic
  source 1..21: mol_type = other DNA
ggagctgttgcactggaagct

SEQ ID NO: 13579 - DNA, 21 bp, synthetic construct
  misc_feature 1..21: note = Synthetic
  source 1..21: mol_type = other DNA
ggaggaacgccaggcctcccc

SEQ ID NO: 13580 - DNA, 21 bp, synthetic construct
  misc_feature 1..21: note = Synthetic
  source 1..21: mol_type = other DNA
ggaggacaatggacagagccc

SEQ ID NO: 13581 - DNA, 21 bp, synthetic construct
  misc_feature 1..21: note = Synthetic
  source 1..21: mol_type = other DNA
ggaggatgggcaccaggctgg

SEQ ID NO: 13582 - DNA, 21 bp, synthetic construct
  misc_feature 1..21: note = Synthetic
  source 1..21: mol_type = other DNA
ggaggatttatttattttttt

SEQ ID NO: 13583 - DNA, 21 bp, synthetic construct
  misc_feature 1..21: note = Synthetic
  source 1..21: mol_type = other DNA
ggaggcacagatactggcagc

SEQ ID NO: 13584 - DNA, 21 bp, synthetic construct
  misc_feature 1..21: note = Synthetic
  source 1..21: mol_type = other DNA
ggaggcatttgcatagaagtg

SEQ ID NO: 13585 - DNA, 21 bp, synthetic construct
  misc_feature 1..21: note = Synthetic
  source 1..21: mol_type = other DNA
ggaggcctcgtctgagccgtc

SEQ ID NO: 13586 - DNA, 21 bp, synthetic construct
  misc_feature 1..21: note = Synthetic
  source 1..21: mol_type = other DNA
ggaggcggctccggggacccg

SEQ ID NO: 13587 - DNA, 21 bp, synthetic construct
  misc_feature 1..21: note = Synthetic
  source 1..21: mol_type = other DNA
ggaggctgtcactgtctctcc

SEQ ID NO: 13588 - DNA, 21 bp, synthetic construct
  misc_feature 1..21: note = Synthetic
  source 1..21: mol_type = other DNA
ggagggcccaggataacggag

SEQ ID NO: 13589 - DNA, 21 bp, synthetic construct
  misc_feature 1..21: note = Synthetic
  source 1..21: mol_type = other DNA
ggagggcgactcgtgtatgtc

SEQ ID NO: 13590 - DNA, 21 bp, synthetic construct
  misc_feature 1..21: note = Synthetic
  source 1..21: mol_type = other DNA
ggaggggcggggagattctga

SEQ ID NO: 13591 - DNA, 21 bp, synthetic construct
  misc_feature 1..21: note = Synthetic
  source 1..21: mol_type = other DNA
ggaggtgtcatcctggtcccc

SEQ ID NO: 13592 - DNA, 21 bp, synthetic construct
  misc_feature 1..21: note = Synthetic
  source 1..21: mol_type = other DNA
ggaggtgtcgccacagagcac

SEQ ID NO: 13593 - DNA, 21 bp, synthetic construct
  misc_feature 1..21: note = Synthetic
  source 1..21: mol_type = other DNA
ggaggtgtcgggaacaggtcg

SEQ ID NO: 13594 - DNA, 21 bp, synthetic construct
  misc_feature 1..21: note = Synthetic
  source 1..21: mol_type = other DNA
ggagtcaacccagtagaggcg

SEQ ID NO: 13595 - DNA, 21 bp, synthetic construct
  misc_feature 1..21: note = Synthetic
  source 1..21: mol_type = other DNA
ggagtctcgctctgtcgccca

SEQ ID NO: 13596 - DNA, 21 bp, synthetic construct
  misc_feature 1..21: note = Synthetic
  source 1..21: mol_type = other DNA
ggagtctgacggaggctgtca

SEQ ID NO: 13597 - DNA, 21 bp, synthetic construct
  misc_feature 1..21: note = Synthetic
  source 1..21: mol_type = other DNA
ggagtgaagtttggagtcaac

SEQ ID NO: 13598 - DNA, 21 bp, synthetic construct
  misc_feature 1..21: note = Synthetic
  source 1..21: mol_type = other DNA
ggagtgcagtggctcgatcat

SEQ ID NO: 13599 - DNA, 21 bp, synthetic construct
  misc_feature 1..21: note = Synthetic
  source 1..21: mol_type = other DNA
ggagtggatgcactcgccact

SEQ ID NO: 13600 - DNA, 21 bp, synthetic construct
  misc_feature 1..21: note = Synthetic
  source 1..21: mol_type = other DNA
ggagttccccagtcagtccag

SEQ ID NO: 13601 - DNA, 21 bp, synthetic construct
  misc_feature 1..21: note = Synthetic
  source 1..21: mol_type = other DNA
ggataacggagggcgactcgt

SEQ ID NO: 13602 - DNA, 21 bp, synthetic construct
  misc_feature 1..21: note = Synthetic
  source 1..21: mol_type = other DNA
ggatcacaggcacgtgccacc

SEQ ID NO: 13603 - DNA, 21 bp, synthetic construct
  misc_feature 1..21: note = Synthetic
  source 1..21: mol_type = other DNA
ggatcacgacctgctgtgtcc

SEQ ID NO: 13604 - DNA, 21 bp, synthetic construct
  misc_feature 1..21: note = Synthetic
  source 1..21: mol_type = other DNA
ggatccaccacgatggccctt

SEQ ID NO: 13605 - DNA, 21 bp, synthetic construct
  misc_feature 1..21: note = Synthetic
  source 1..21: mol_type = other DNA
ggatccagtccacagccagcc

SEQ ID NO: 13606 - DNA, 21 bp, synthetic construct
  misc_feature 1..21: note = Synthetic
  source 1..21: mol_type = other DNA
ggatcccatcccaacacacac

SEQ ID NO: 13607 - DNA, 21 bp, synthetic construct
  misc_feature 1..21: note = Synthetic
  source 1..21: mol_type = other DNA
ggatcctgacactcatcgata

SEQ ID NO: 13608 - DNA, 21 bp, synthetic construct
  misc_feature 1..21: note = Synthetic
  source 1..21: mol_type = other DNA
ggatctcgctttgttgctcag

SEQ ID NO: 13609 - DNA, 21 bp, synthetic construct
  misc_feature 1..21: note = Synthetic
  source 1..21: mol_type = other DNA
ggatgaggcagggccaggggg

SEQ ID NO: 13610 - DNA, 21 bp, synthetic construct
  misc_feature 1..21: note = Synthetic
  source 1..21: mol_type = other DNA
ggatgaggctggtgtactcgc

SEQ ID NO: 13611 - DNA, 21 bp, synthetic construct
  misc_feature 1..21: note = Synthetic
  source 1..21: mol_type = other DNA
ggatgcactcgccacttaggc

SEQ ID NO: 13612 - DNA, 21 bp, synthetic construct
  misc_feature 1..21: note = Synthetic
  source 1..21: mol_type = other DNA
ggatgcaggtggagctgttgc

SEQ ID NO: 13613 - DNA, 21 bp, synthetic construct
  misc_feature 1..21: note = Synthetic
  source 1..21: mol_type = other DNA
ggatgcagtttccatcagagc

SEQ ID NO: 13614 - DNA, 21 bp, synthetic construct
  misc_feature 1..21: note = Synthetic
  source 1..21: mol_type = other DNA
ggatgggcaccaggctggtgt

SEQ ID NO: 13615 - DNA, 21 bp, synthetic construct
  misc_feature 1..21: note = Synthetic
  source 1..21: mol_type = other DNA
ggatggtctcgatctcctgac

SEQ ID NO: 13616 - DNA, 21 bp, synthetic construct
  misc_feature 1..21: note = Synthetic
  source 1..21: mol_type = other DNA
ggatgtctcctgggtggccac

SEQ ID NO: 13617 - DNA, 21 bp, synthetic construct
  misc_feature 1..21: note = Synthetic
  source 1..21: mol_type = other DNA
ggatgtctctgctgatgacgg

SEQ ID NO: 13618 - DNA, 21 bp, synthetic construct
  misc_feature 1..21: note = Synthetic
  source 1..21: mol_type = other DNA
ggattacaggcgtgagccact

SEQ ID NO: 13619 - DNA, 21 bp, synthetic construct
  misc_feature 1..21: note = Synthetic
  source 1..21: mol_type = other DNA
ggattacaggcgtgaggcacc

SEQ ID NO: 13620 - DNA, 21 bp, synthetic construct
  misc_feature 1..21: note = Synthetic
  source 1..21: mol_type = other DNA
ggattcagccagatcatttcc

SEQ ID NO: 13621 - DNA, 21 bp, synthetic construct
  misc_feature 1..21: note = Synthetic
  source 1..21: mol_type = other DNA
ggattgtgtcacggtggagag

SEQ ID NO: 13622 - DNA, 21 bp, synthetic construct
  misc_feature 1..21: note = Synthetic
  source 1..21: mol_type = other DNA
ggatttatttatttttttata

SEQ ID NO: 13623 - DNA, 21 bp, synthetic construct
  misc_feature 1..21: note = Synthetic
  source 1..21: mol_type = other DNA
ggatttgcaggtgacagacaa

SEQ ID NO: 13624 - DNA, 21 bp, synthetic construct
  misc_feature 1..21: note = Synthetic
  source 1..21: mol_type = other DNA
ggcaaaggaagacgaggagca

SEQ ID NO: 13625 - DNA, 21 bp, synthetic construct
  misc_feature 1..21: note = Synthetic
  source 1..21: mol_type = other DNA
ggcaaaggctaacctggctgt

SEQ ID NO: 13626 - DNA, 21 bp, synthetic construct
  misc_feature 1..21: note = Synthetic
  source 1..21: mol_type = other DNA
ggcaaatgtggacctcatcct

SEQ ID NO: 13627 - DNA, 21 bp, synthetic construct
  misc_feature 1..21: note = Synthetic
  source 1..21: mol_type = other DNA
ggcaacgtttcaacctcgtaa

SEQ ID NO: 13628 - DNA, 21 bp, synthetic construct
  misc_feature 1..21: note = Synthetic
  source 1..21: mol_type = other DNA
ggcaataaccccctacacagg

SEQ ID NO: 13629 - DNA, 21 bp, synthetic construct
  misc_feature 1..21: note = Synthetic
  source 1..21: mol_type = other DNA
ggcaatgctttggtcttctct

SEQ ID NO: 13630 - DNA, 21 bp, synthetic construct
  misc_feature 1..21: note = Synthetic
  source 1..21: mol_type = other DNA
ggcacagatactggcagccgc

SEQ ID NO: 13631 - DNA, 21 bp, synthetic construct
  misc_feature 1..21: note = Synthetic
  source 1..21: mol_type = other DNA
ggcacaggcactcgtagccga

SEQ ID NO: 13632 - DNA, 21 bp, synthetic construct
  misc_feature 1..21: note = Synthetic
  source 1..21: mol_type = other DNA
ggcaccaggctggtgtcctga

SEQ ID NO: 13633 - DNA, 21 bp, synthetic construct
  misc_feature 1..21: note = Synthetic
  source 1..21: mol_type = other DNA
ggcacctgtgtctggccaaat

SEQ ID NO: 13634 - DNA, 21 bp, synthetic construct
  misc_feature 1..21: note = Synthetic
  source 1..21: mol_type = other DNA
ggcacgctctgtcacacagct

SEQ ID NO: 13635 - DNA, 21 bp, synthetic construct
  misc_feature 1..21: note = Synthetic
  source 1..21: mol_type = other DNA
ggcacgtgccaccgtacccag

SEQ ID NO: 13636 - DNA, 21 bp, synthetic construct
  misc_feature 1..21: note = Synthetic
  source 1..21: mol_type = other DNA
ggcactcagcgctgccatcgc

SEQ ID NO: 13637 - DNA, 21 bp, synthetic construct
  misc_feature 1..21: note = Synthetic
  source 1..21: mol_type = other DNA
ggcactcgtagccgatcttaa

SEQ ID NO: 13638 - DNA, 21 bp, synthetic construct
  misc_feature 1..21: note = Synthetic
  source 1..21: mol_type = other DNA
ggcactgaaaatggcttcgtt

SEQ ID NO: 13639 - DNA, 21 bp, synthetic construct
  misc_feature 1..21: note = Synthetic
  source 1..21: mol_type = other DNA
ggcactggaactcgtttcttt

SEQ ID NO: 13640 - DNA, 21 bp, synthetic construct
  misc_feature 1..21: note = Synthetic
  source 1..21: mol_type = other DNA
ggcactgtccgaagcctgttc

SEQ ID NO: 13641 - DNA, 21 bp, synthetic construct
  misc_feature 1..21: note = Synthetic
  source 1..21: mol_type = other DNA
ggcacttaataaatattaagg

SEQ ID NO: 13642 - DNA, 21 bp, synthetic construct
  misc_feature 1..21: note = Synthetic
  source 1..21: mol_type = other DNA
ggcacttgtagccaccctcca

SEQ ID NO: 13643 - DNA, 21 bp, synthetic construct
  misc_feature 1..21: note = Synthetic
  source 1..21: mol_type = other DNA
ggcagatgttcacgccacgtc

SEQ ID NO: 13644 - DNA, 21 bp, synthetic construct
  misc_feature 1..21: note = Synthetic
  source 1..21: mol_type = other DNA
ggcagccgccattgctcaggg

SEQ ID NO: 13645 - DNA, 21 bp, synthetic construct
  misc_feature 1..21: note = Synthetic
  source 1..21: mol_type = other DNA
ggcagccgggaggtgtcggga

SEQ ID NO: 13646 - DNA, 21 bp, synthetic construct
  misc_feature 1..21: note = Synthetic
  source 1..21: mol_type = other DNA
ggcagcgaaactcgtcctggg

SEQ ID NO: 13647 - DNA, 21 bp, synthetic construct
  misc_feature 1..21: note = Synthetic
  source 1..21: mol_type = other DNA
ggcagctcctcatgtccctgg

SEQ ID NO: 13648 - DNA, 21 bp, synthetic construct
  misc_feature 1..21: note = Synthetic
  source 1..21: mol_type = other DNA
ggcaggaggcctcgtctgagc

SEQ ID NO: 13649 - DNA, 21 bp, synthetic construct
  misc_feature 1..21: note = Synthetic
  source 1..21: mol_type = other DNA
ggcaggcaatgctttggtctt

SEQ ID NO: 13650 - DNA, 21 bp, synthetic construct
  misc_feature 1..21: note = Synthetic
  source 1..21: mol_type = other DNA
ggcaggcgcaggtaaacttgg

SEQ ID NO: 13651 - DNA, 21 bp, synthetic construct
  misc_feature 1..21: note = Synthetic
  source 1..21: mol_type = other DNA
ggcagggacgggactccaggc

SEQ ID NO: 13652 - DNA, 21 bp, synthetic construct
  misc_feature 1..21: note = Synthetic
  source 1..21: mol_type = other DNA
ggcagggaggcacagatactg

SEQ ID NO: 13653 - DNA, 21 bp, synthetic construct
  misc_feature 1..21: note = Synthetic
  source 1..21: mol_type = other DNA
ggcagggccagggggtcccgt

SEQ ID NO: 13654 - DNA, 21 bp, synthetic construct
  misc_feature 1..21: note = Synthetic
  source 1..21: mol_type = other DNA
ggcagtctctagccatgttgc

SEQ ID NO: 13655 - DNA, 21 bp, synthetic construct
  misc_feature 1..21: note = Synthetic
  source 1..21: mol_type = other DNA
ggcagtggaactcgaaggccg

SEQ ID NO: 13656 - DNA, 21 bp, synthetic construct
  misc_feature 1..21: note = Synthetic
  source 1..21: mol_type = other DNA
ggcagtgtcccgacccggatc

SEQ ID NO: 13657 - DNA, 21 bp, synthetic construct
  misc_feature 1..21: note = Synthetic
  source 1..21: mol_type = other DNA
ggcagttctcgatattcacga

SEQ ID NO: 13658 - DNA, 21 bp, synthetic construct
  misc_feature 1..21: note = Synthetic
  source 1..21: mol_type = other DNA
ggcataatcatagctcacgac

SEQ ID NO: 13659 - DNA, 21 bp, synthetic construct
  misc_feature 1..21: note = Synthetic
  source 1..21: mol_type = other DNA
ggcatcatttggtgaatgagt

SEQ ID NO: 13660 - DNA, 21 bp, synthetic construct
  misc_feature 1..21: note = Synthetic
  source 1..21: mol_type = other DNA
ggcattcattgacacgggctt

SEQ ID NO: 13661 - DNA, 21 bp, synthetic construct
  misc_feature 1..21: note = Synthetic
  source 1..21: mol_type = other DNA
ggcatttcagaggcaataacc

SEQ ID NO: 13662 - DNA, 21 bp, synthetic construct
  misc_feature 1..21: note = Synthetic
  source 1..21: mol_type = other DNA
ggcatttgcatagaagtggaa

SEQ ID NO: 13663 - DNA, 21 bp, synthetic construct
  misc_feature 1..21: note = Synthetic
  source 1..21: mol_type = other DNA
ggccaaattcattttttaaga

SEQ ID NO: 13664 - DNA, 21 bp, synthetic construct
  misc_feature 1..21: note = Synthetic
  source 1..21: mol_type = other DNA
ggccaaggagaaggggtgggc

SEQ ID NO: 13665 - DNA, 21 bp, synthetic construct
  misc_feature 1..21: note = Synthetic
  source 1..21: mol_type = other DNA
ggccaaggtaaccgggtgtct

SEQ ID NO: 13666 - DNA, 21 bp, synthetic construct
  misc_feature 1..21: note = Synthetic
  source 1..21: mol_type = other DNA
ggccacagcgcagttttcctc

SEQ ID NO: 13667 - DNA, 21 bp, synthetic construct
  misc_feature 1..21: note = Synthetic
  source 1..21: mol_type = other DNA
ggccacaggacagccttgctc

SEQ ID NO: 13668 - DNA, 21 bp, synthetic construct
  misc_feature 1..21: note = Synthetic
  source 1..21: mol_type = other DNA
ggccaccagctggaagccgtc

SEQ ID NO: 13669 - DNA, 21 bp, synthetic construct
  misc_feature 1..21: note = Synthetic
  source 1..21: mol_type = other DNA
ggccaccatcacagcgccagc

SEQ ID NO: 13670 - DNA, 21 bp, synthetic construct
  misc_feature 1..21: note = Synthetic
  source 1..21: mol_type = other DNA
ggccacctccgtgtccagagc

SEQ ID NO: 13671 - DNA, 21 bp, synthetic construct
  misc_feature 1..21: note = Synthetic
  source 1..21: mol_type = other DNA
ggccacgtgtcctcacggcca

SEQ ID NO: 13672 - DNA, 21 bp, synthetic construct
  misc_feature 1..21: note = Synthetic
  source 1..21: mol_type = other DNA
ggccactcatccgagccatct

SEQ ID NO: 13673 - DNA, 21 bp, synthetic construct
  misc_feature 1..21: note = Synthetic
  source 1..21: mol_type = other DNA
ggccactgaatgttttcagtc

SEQ ID NO: 13674 - DNA, 21 bp, synthetic construct
  misc_feature 1..21: note = Synthetic
  source 1..21: mol_type = other DNA
ggccactgaggagatctaggg

SEQ ID NO: 13675 - DNA, 21 bp, synthetic construct
  misc_feature 1..21: note = Synthetic
  source 1..21: mol_type = other DNA
ggccactgcagcctcagcctc

SEQ ID NO: 13676 - DNA, 21 bp, synthetic construct
  misc_feature 1..21: note = Synthetic
  source 1..21: mol_type = other DNA
ggccagactgcggactgcagt

SEQ ID NO: 13677 - DNA, 21 bp, synthetic construct
  misc_feature 1..21: note = Synthetic
  source 1..21: mol_type = other DNA
ggccagaggccatgggctgct

SEQ ID NO: 13678 - DNA, 21 bp, synthetic construct
  misc_feature 1..21: note = Synthetic
  source 1..21: mol_type = other DNA
ggccagcagcatgccgtccgg

SEQ ID NO: 13679 - DNA, 21 bp, synthetic construct
  misc_feature 1..21: note = Synthetic
  source 1..21: mol_type = other DNA
ggccagcctcttttcatcctc

SEQ ID NO: 13680 - DNA, 21 bp, synthetic construct
  misc_feature 1..21: note = Synthetic
  source 1..21: mol_type = other DNA
ggccagggggtcccgttggtg

SEQ ID NO: 13681 - DNA, 21 bp, synthetic construct
  misc_feature 1..21: note = Synthetic
  source 1..21: mol_type = other DNA
ggccatcgcacctccagaact

SEQ ID NO: 13682 - DNA, 21 bp, synthetic construct
  misc_feature 1..21: note = Synthetic
  source 1..21: mol_type = other DNA
ggccatgggctgctgatgcac

SEQ ID NO: 13683 - DNA, 21 bp, synthetic construct
  misc_feature 1..21: note = Synthetic
  source 1..21: mol_type = other DNA
ggcccacagctgggggatgca

SEQ ID NO: 13684 - DNA, 21 bp, synthetic construct
  misc_feature 1..21: note = Synthetic
  source 1..21: mol_type = other DNA
ggcccaggataacggagggcg

SEQ ID NO: 13685 - DNA, 21 bp, synthetic construct
  misc_feature 1..21: note = Synthetic
  source 1..21: mol_type = other DNA
ggccccaggcagccgggaggt

SEQ ID NO: 13686 - DNA, 21 bp, synthetic construct
  misc_feature 1..21: note = Synthetic
  source 1..21: mol_type = other DNA
ggccccatgctcgcagcctct

SEQ ID NO: 13687 - DNA, 21 bp, synthetic construct
  misc_feature 1..21: note = Synthetic
  source 1..21: mol_type = other DNA
ggcccccacagctgaagtccc

SEQ ID NO: 13688 - DNA, 21 bp, synthetic construct
  misc_feature 1..21: note = Synthetic
  source 1..21: mol_type = other DNA
ggccccctttcttgatcttgg

SEQ ID NO: 13689 - DNA, 21 bp, synthetic construct
  misc_feature 1..21: note = Synthetic
  source 1..21: mol_type = other DNA
ggccccgagaatagtcactga

SEQ ID NO: 13690 - DNA, 21 bp, synthetic construct
  misc_feature 1..21: note = Synthetic
  source 1..21: mol_type = other DNA
ggcccctctgtgaacttgatc

SEQ ID NO: 13691 - DNA, 21 bp, synthetic construct
  misc_feature 1..21: note = Synthetic
  source 1..21: mol_type = other DNA
ggcccttggcttggagccgtt

SEQ ID NO: 13692 - DNA, 21 bp, synthetic construct
  misc_feature 1..21: note = Synthetic
  source 1..21: mol_type = other DNA
ggccgagcaggggctactgtc

SEQ ID NO: 13693 - DNA, 21 bp, synthetic construct
  misc_feature 1..21: note = Synthetic
  source 1..21: mol_type = other DNA
ggccggcgaggtctcaggaag

SEQ ID NO: 13694 - DNA, 21 bp, synthetic construct
  misc_feature 1..21: note = Synthetic
  source 1..21: mol_type = other DNA
ggccgggggcccctctgtgaa

SEQ ID NO: 13695 - DNA, 21 bp, synthetic construct
  misc_feature 1..21: note = Synthetic
  source 1..21: mol_type = other DNA
ggcctcaccgtgcatgtttta

SEQ ID NO: 13696 - DNA, 21 bp, synthetic construct
  misc_feature 1..21: note = Synthetic
  source 1..21: mol_type = other DNA
ggcctcccaaagtgctgggat

SEQ ID NO: 13697 - DNA, 21 bp, synthetic construct
  misc_feature 1..21: note = Synthetic
  source 1..21: mol_type = other DNA
ggcctcgtctgagccgtccaa

SEQ ID NO: 13698 - DNA, 21 bp, synthetic construct
  misc_feature 1..21: note = Synthetic
  source 1..21: mol_type = other DNA
ggcctgacatcccctcccctt

SEQ ID NO: 13699 - DNA, 21 bp, synthetic construct
  misc_feature 1..21: note = Synthetic
  source 1..21: mol_type = other DNA
ggcctggatgtctctgctgat

SEQ ID NO: 13700 - DNA, 21 bp, synthetic construct
  misc_feature 1..21: note = Synthetic
  source 1..21: mol_type = other DNA
ggcctgggatcccatcccaac

SEQ ID NO: 13701 - DNA, 21 bp, synthetic construct
  misc_feature 1..21: note = Synthetic
  source 1..21: mol_type = other DNA
ggcctggtctccaactcctga

SEQ ID NO: 13702 - DNA, 21 bp, synthetic construct
  misc_feature 1..21: note = Synthetic
  source 1..21: mol_type = other DNA
ggcctgtttctcttatccttc

SEQ ID NO: 13703 - DNA, 21 bp, synthetic construct
  misc_feature 1..21: note = Synthetic
  source 1..21: mol_type = other DNA
ggccttcgtgtgggggtccag

SEQ ID NO: 13704 - DNA, 21 bp, synthetic construct
  misc_feature 1..21: note = Synthetic
  source 1..21: mol_type = other DNA
ggccttgagggtggccggggg

SEQ ID NO: 13705 - DNA, 21 bp, synthetic construct
  misc_feature 1..21: note = Synthetic
  source 1..21: mol_type = other DNA
ggcgacaggtggccacagcgc

SEQ ID NO: 13706 - DNA, 21 bp, synthetic construct
  misc_feature 1..21: note = Synthetic
  source 1..21: mol_type = other DNA
ggcgacaggtggccacaggac

SEQ ID NO: 13707 - DNA, 21 bp, synthetic construct
  misc_feature 1..21: note = Synthetic
  source 1..21: mol_type = other DNA
ggcgacggtccagcgcaattt

SEQ ID NO: 13708 - DNA, 21 bp, synthetic construct
  misc_feature 1..21: note = Synthetic
  source 1..21: mol_type = other DNA
ggcgactcgtgtatgtcgcgg

SEQ ID NO: 13709 - DNA, 21 bp, synthetic construct
  misc_feature 1..21: note = Synthetic
  source 1..21: mol_type = other DNA
ggcgaggagcaaggcgacggt

SEQ ID NO: 13710 - DNA, 21 bp, synthetic construct
  misc_feature 1..21: note = Synthetic
  source 1..21: mol_type = other DNA
ggcgagggcgccccccaggac

SEQ ID NO: 13711 - DNA, 21 bp, synthetic construct
  misc_feature 1..21: note = Synthetic
  source 1..21: mol_type = other DNA
ggcgaggtctcaggaagggtt

SEQ ID NO: 13712 - DNA, 21 bp, synthetic construct
  misc_feature 1..21: note = Synthetic
  source 1..21: mol_type = other DNA
ggcgagtgggggttgatctgc

SEQ ID NO: 13713 - DNA, 21 bp, synthetic construct
  misc_feature 1..21: note = Synthetic
  source 1..21: mol_type = other DNA
ggcgatcctcctgcctcagcc

SEQ ID NO: 13714 - DNA, 21 bp, synthetic construct
  misc_feature 1..21: note = Synthetic
  source 1..21: mol_type = other DNA
ggcgatggagcccacagcctt

SEQ ID NO: 13715 - DNA, 21 bp, synthetic construct
  misc_feature 1..21: note = Synthetic
  source 1..21: mol_type = other DNA
ggcgatggggaggacaatgga

SEQ ID NO: 13716 - DNA, 21 bp, synthetic construct
  misc_feature 1..21: note = Synthetic
  source 1..21: mol_type = other DNA
ggcgatttcagaaagaacctg

SEQ ID NO: 13717 - DNA, 21 bp, synthetic construct
  misc_feature 1..21: note = Synthetic
  source 1..21: mol_type = other DNA
ggcgcaatctcggctcactgc

SEQ ID NO: 13718 - DNA, 21 bp, synthetic construct
  misc_feature 1..21: note = Synthetic
  source 1..21: mol_type = other DNA
ggcgcaggtaaacttgggcga

SEQ ID NO: 13719 - DNA, 21 bp, synthetic construct
  misc_feature 1..21: note = Synthetic
  source 1..21: mol_type = other DNA
ggcgccccccaggacaaggtg

SEQ ID NO: 13720 - DNA, 21 bp, synthetic construct
  misc_feature 1..21: note = Synthetic
  source 1..21: mol_type = other DNA
ggcggacataaagacgacaat

SEQ ID NO: 13721 - DNA, 21 bp, synthetic construct
  misc_feature 1..21: note = Synthetic
  source 1..21: mol_type = other DNA
ggcggccactgaggagatcta

SEQ ID NO: 13722 - DNA, 21 bp, synthetic construct
  misc_feature 1..21: note = Synthetic
  source 1..21: mol_type = other DNA
ggcggctccggggacccggga

SEQ ID NO: 13723 - DNA, 21 bp, synthetic construct
  misc_feature 1..21: note = Synthetic
  source 1..21: mol_type = other DNA
ggcgggaccacaggtgagcac

SEQ ID NO: 13724 - DNA, 21 bp, synthetic construct
  misc_feature 1..21: note = Synthetic
  source 1..21: mol_type = other DNA
ggcgggagttccccagtcagt

SEQ ID NO: 13725 - DNA, 21 bp, synthetic construct
  misc_feature 1..21: note = Synthetic
  source 1..21: mol_type = other DNA
ggcggggagattctgaggcaa

SEQ ID NO: 13726 - DNA, 21 bp, synthetic construct
  misc_feature 1..21: note = Synthetic
  source 1..21: mol_type = other DNA
ggcggttggcactgaaaatgg

SEQ ID NO: 13727 - DNA, 21 bp, synthetic construct
  misc_feature 1..21: note = Synthetic
  source 1..21: mol_type = other DNA
ggcgtgagccactgcgcccgg

SEQ ID NO: 13728 - DNA, 21 bp, synthetic construct
  misc_feature 1..21: note = Synthetic
  source 1..21: mol_type = other DNA
ggcgtgaggcacctgtgtctg

SEQ ID NO: 13729 - DNA, 21 bp, synthetic construct
  misc_feature 1..21: note = Synthetic
  source 1..21: mol_type = other DNA
ggctaacctggctgtctagca

SEQ ID NO: 13730 - DNA, 21 bp, synthetic construct
  misc_feature 1..21: note = Synthetic
  source 1..21: mol_type = other DNA
ggctaattttttgtattttta

SEQ ID NO: 13731 - DNA, 21 bp, synthetic construct
  misc_feature 1..21: note = Synthetic
  source 1..21: mol_type = other DNA
ggctacaaaaaccttctatac

SEQ ID NO: 13732 - DNA, 21 bp, synthetic construct
  misc_feature 1..21: note = Synthetic
  source 1..21: mol_type = other DNA
ggctactgtccccttggaaca

SEQ ID NO: 13733 - DNA, 21 bp, synthetic construct
  misc_feature 1..21: note = Synthetic
  source 1..21: mol_type = other DNA
ggctcactgcaacctccacct

SEQ ID NO: 13734 - DNA, 21 bp, synthetic construct
  misc_feature 1..21: note = Synthetic
  source 1..21: mol_type = other DNA
ggctcactgcaagctccgctt

SEQ ID NO: 13735 - DNA, 21 bp, synthetic construct
  misc_feature 1..21: note = Synthetic
  source 1..21: mol_type = other DNA
ggctcaggcgatcctcctgcc

SEQ ID NO: 13736 - DNA, 21 bp, synthetic construct
  misc_feature 1..21: note = Synthetic
  source 1..21: mol_type = other DNA
ggctccggggacccgggactt

SEQ ID NO: 13737 - DNA, 21 bp, synthetic construct
  misc_feature 1..21: note = Synthetic
  source 1..21: mol_type = other DNA
ggctcgatcatggctcactgc

SEQ ID NO: 13738 - DNA, 21 bp, synthetic construct
  misc_feature 1..21: note = Synthetic
  source 1..21: mol_type = other DNA
ggctctgcctctgggaagtgg

SEQ ID NO: 13739 - DNA, 21 bp, synthetic construct
  misc_feature 1..21: note = Synthetic
  source 1..21: mol_type = other DNA
ggctctgtcaagctgggtgct

SEQ ID NO: 13740 - DNA, 21 bp, synthetic construct
  misc_feature 1..21: note = Synthetic
  source 1..21: mol_type = other DNA
ggctgaagatctcggctgcag

SEQ ID NO: 13741 - DNA, 21 bp, synthetic construct
  misc_feature 1..21: note = Synthetic
  source 1..21: mol_type = other DNA
ggctgcagaccaaggaggggc

SEQ ID NO: 13742 - DNA, 21 bp, synthetic construct
  misc_feature 1..21: note = Synthetic
  source 1..21: mol_type = other DNA
ggctgcaggtgtcgggatcct

SEQ ID NO: 13743 - DNA, 21 bp, synthetic construct
  misc_feature 1..21: note = Synthetic
  source 1..21: mol_type = other DNA
ggctgccatggatgcagtttc

SEQ ID NO: 13744 - DNA, 21 bp, synthetic construct
  misc_feature 1..21: note = Synthetic
  source 1..21: mol_type = other DNA
ggctgctgatgcaccatgcat

SEQ ID NO: 13745 - DNA, 21 bp, synthetic construct
  misc_feature 1..21: note = Synthetic
  source 1..21: mol_type = other DNA
ggctggaaagcagtggcataa

SEQ ID NO: 13746 - DNA, 21 bp, synthetic construct
  misc_feature 1..21: note = Synthetic
  source 1..21: mol_type = other DNA
ggctggagtgcagtggctcga

SEQ ID NO: 13747 - DNA, 21 bp, synthetic construct
  misc_feature 1..21: note = Synthetic
  source 1..21: mol_type = other DNA
ggctgggtgaggttgtggaag

SEQ ID NO: 13748 - DNA, 21 bp, synthetic construct
  misc_feature 1..21: note = Synthetic
  source 1..21: mol_type = other DNA
ggctggtggggcgagggcgcc

SEQ ID NO: 13749 - DNA, 21 bp, synthetic construct
  misc_feature 1..21: note = Synthetic
  source 1..21: mol_type = other DNA
ggctggtgtactcgctccggt

SEQ ID NO: 13750 - DNA, 21 bp, synthetic construct
  misc_feature 1..21: note = Synthetic
  source 1..21: mol_type = other DNA
ggctggtgtcctgacagccac

SEQ ID NO: 13751 - DNA, 21 bp, synthetic construct
  misc_feature 1..21: note = Synthetic
  source 1..21: mol_type = other DNA
ggctgtcactgtctctccgga

SEQ ID NO: 13752 - DNA, 21 bp, synthetic construct
  misc_feature 1..21: note = Synthetic
  source 1..21: mol_type = other DNA
ggctgtctagcaaggcttgca

SEQ ID NO: 13753 - DNA, 21 bp, synthetic construct
  misc_feature 1..21: note = Synthetic
  source 1..21: mol_type = other DNA
ggctgtggagctgacctttag

SEQ ID NO: 13754 - DNA, 21 bp, synthetic construct
  misc_feature 1..21: note = Synthetic
  source 1..21: mol_type = other DNA
ggcttaaggaaggtacaaacc

SEQ ID NO: 13755 - DNA, 21 bp, synthetic construct
  misc_feature 1..21: note = Synthetic
  source 1..21: mol_type = other DNA
ggcttagagattggtggatga

SEQ ID NO: 13756 - DNA, 21 bp, synthetic construct
  misc_feature 1..21: note = Synthetic
  source 1..21: mol_type = other DNA
ggcttatcacggttccctgca

SEQ ID NO: 13757 - DNA, 21 bp, synthetic construct
  misc_feature 1..21: note = Synthetic
  source 1..21: mol_type = other DNA
ggcttcgttgatgatatctgt

SEQ ID NO: 13758 - DNA, 21 bp, synthetic construct
  misc_feature 1..21: note = Synthetic
  source 1..21: mol_type = other DNA
ggcttcttctcatttcctctg

SEQ ID NO: 13759 - DNA, 21 bp, synthetic construct
  misc_feature 1..21: note = Synthetic
  source 1..21: mol_type = other DNA
ggcttgcatagaagaggtaaa

SEQ ID NO: 13760 - DNA, 21 bp, synthetic construct
  misc_feature 1..21: note = Synthetic
  source 1..21: mol_type = other DNA
ggcttggagccgttctccctg

SEQ ID NO: 13761 - DNA, 21 bp, synthetic construct
  misc_feature 1..21: note = Synthetic
  source 1..21: mol_type = other DNA
ggcttggaggcatttgcatag

SEQ ID NO: 13762 - DNA, 21 bp, synthetic construct
  misc_feature 1..21: note = Synthetic
  source 1..21: mol_type = other DNA
ggctttccctggcctgggatc

SEQ ID NO: 13763 - DNA, 21 bp, synthetic construct
  misc_feature 1..21: note = Synthetic
  source 1..21: mol_type = other DNA
ggctttgaagtcccggtcaac

SEQ ID NO: 13764 - DNA, 21 bp, synthetic construct
  misc_feature 1..21: note = Synthetic
  source 1..21: mol_type = other DNA
gggaacagccgccgttgttgt

SEQ ID NO: 13765 - DNA, 21 bp, synthetic construct
  misc_feature 1..21: note = Synthetic
  source 1..21: mol_type = other DNA
gggaacaggtcgggtggttgt

SEQ ID NO: 13766 - DNA, 21 bp, synthetic construct
  misc_feature 1..21: note = Synthetic
  source 1..21: mol_type = other DNA
gggaagtgaatggcttggagg

SEQ ID NO: 13767 - DNA, 21 bp, synthetic construct
  misc_feature 1..21: note = Synthetic
  source 1..21: mol_type = other DNA
gggaagtggcatcatttggtg

SEQ ID NO: 13768 - DNA, 21 bp, synthetic construct
  misc_feature 1..21: note = Synthetic
  source 1..21: mol_type = other DNA
gggaatggaagtgggtagggg

SEQ ID NO: 13769 - DNA, 21 bp, synthetic construct
  misc_feature 1..21: note = Synthetic
  source 1..21: mol_type = other DNA
gggacaattgccaatcccttg

SEQ ID NO: 13770 - DNA, 21 bp, synthetic construct
  misc_feature 1..21: note = Synthetic
  source 1..21: mol_type = other DNA
gggacacagtgttttgtccct

SEQ ID NO: 13771 - DNA, 21 bp, synthetic construct
  misc_feature 1..21: note = Synthetic
  source 1..21: mol_type = other DNA
gggacagccttgctcgtctga

SEQ ID NO: 13772 - DNA, 21 bp, synthetic construct
  misc_feature 1..21: note = Synthetic
  source 1..21: mol_type = other DNA
gggacaggtcagaccagtaga

SEQ ID NO: 13773 - DNA, 21 bp, synthetic construct
  misc_feature 1..21: note = Synthetic
  source 1..21: mol_type = other DNA
gggacagtaggttttcagcca

SEQ ID NO: 13774 - DNA, 21 bp, synthetic construct
  misc_feature 1..21: note = Synthetic
  source 1..21: mol_type = other DNA
gggacatcattctcccaaaaa

SEQ ID NO: 13775 - DNA, 21 bp, synthetic construct
  misc_feature 1..21: note = Synthetic
  source 1..21: mol_type = other DNA
gggaccacaggtgagcaccgg

SEQ ID NO: 13776 - DNA, 21 bp, synthetic construct
  misc_feature 1..21: note = Synthetic
  source 1..21: mol_type = other DNA
gggacccgggacttgtcgtcg

SEQ ID NO: 13777 - DNA, 21 bp, synthetic construct
  misc_feature 1..21: note = Synthetic
  source 1..21: mol_type = other DNA
gggacgcatttacgtgctccg

SEQ ID NO: 13778 - DNA, 21 bp, synthetic construct
  misc_feature 1..21: note = Synthetic
  source 1..21: mol_type = other DNA
gggacggaggtgtcgccacag

SEQ ID NO: 13779 - DNA, 21 bp, synthetic construct
  misc_feature 1..21: note = Synthetic
  source 1..21: mol_type = other DNA
gggacgggactccaggcagat

SEQ ID NO: 13780 - DNA, 21 bp, synthetic construct
  misc_feature 1..21: note = Synthetic
  source 1..21: mol_type = other DNA
gggactacaggtgcccgccac

SEQ ID NO: 13781 - DNA, 21 bp, synthetic construct
  misc_feature 1..21: note = Synthetic
  source 1..21: mol_type = other DNA
gggactcatcagagccatcct

SEQ ID NO: 13782 - DNA, 21 bp, synthetic construct
  misc_feature 1..21: note = Synthetic
  source 1..21: mol_type = other DNA
gggactccaggcagatgttca

SEQ ID NO: 13783 - DNA, 21 bp, synthetic construct
  misc_feature 1..21: note = Synthetic
  source 1..21: mol_type = other DNA
gggacttcgccaggagggccc

SEQ ID NO: 13784 - DNA, 21 bp, synthetic construct
  misc_feature 1..21: note = Synthetic
  source 1..21: mol_type = other DNA
gggacttgtcgtcgcctttgt

SEQ ID NO: 13785 - DNA, 21 bp, synthetic construct
  misc_feature 1..21: note = Synthetic
  source 1..21: mol_type = other DNA
gggagaggcacgctctgtcac

SEQ ID NO: 13786 - DNA, 21 bp, synthetic construct
  misc_feature 1..21: note = Synthetic
  source 1..21: mol_type = other DNA
gggagattctgaggcaacgtt

SEQ ID NO: 13787 - DNA, 21 bp, synthetic construct
  misc_feature 1..21: note = Synthetic
  source 1..21: mol_type = other DNA
gggagcacgtctcctgggact

SEQ ID NO: 13788 - DNA, 21 bp, synthetic construct
  misc_feature 1..21: note = Synthetic
  source 1..21: mol_type = other DNA
gggagcacgtcttgggggagc

SEQ ID NO: 13789 - DNA, 21 bp, synthetic construct
  misc_feature 1..21: note = Synthetic
  source 1..21: mol_type = other DNA
gggagcacgtcttggggggac

SEQ ID NO: 13790 - DNA, 21 bp, synthetic construct
  misc_feature 1..21: note = Synthetic
  source 1..21: mol_type = other DNA
gggaggacaatggacagagcc

SEQ ID NO: 13791 - DNA, 21 bp, synthetic construct
  misc_feature 1..21: note = Synthetic
  source 1..21: mol_type = other DNA
gggaggatgggcaccaggctg

SEQ ID NO: 13792 - DNA, 21 bp, synthetic construct
  misc_feature 1..21: note = Synthetic
  source 1..21: mol_type = other DNA
gggaggcacagatactggcag

SEQ ID NO: 13793 - DNA, 21 bp, synthetic construct
  misc_feature 1..21: note = Synthetic
  source 1..21: mol_type = other DNA
gggaggtgtcgggaacaggtc

SEQ ID NO: 13794 - DNA, 21 bp, synthetic construct
  misc_feature 1..21: note = Synthetic
  source 1..21: mol_type = other DNA
gggagtctgacggaggctgtc

SEQ ID NO: 13795 - DNA, 21 bp, synthetic construct
  misc_feature 1..21: note = Synthetic
  source 1..21: mol_type = other DNA
gggagttccccagtcagtcca

SEQ ID NO: 13796 - DNA, 21 bp, synthetic construct
  misc_feature 1..21: note = Synthetic
  source 1..21: mol_type = other DNA
gggatcacaggcacgtgccac

SEQ ID NO: 13797 - DNA, 21 bp, synthetic construct
  misc_feature 1..21: note = Synthetic
  source 1..21: mol_type = other DNA
gggatcccatcccaacacaca

SEQ ID NO: 13798 - DNA, 21 bp, synthetic construct
  misc_feature 1..21: note = Synthetic
  source 1..21: mol_type = other DNA
gggatcctgacactcatcgat

SEQ ID NO: 13799 - DNA, 21 bp, synthetic construct
  misc_feature 1..21: note = Synthetic
  source 1..21: mol_type = other DNA
gggatctcgctttgttgctca

SEQ ID NO: 13800 - DNA, 21 bp, synthetic construct
  misc_feature 1..21: note = Synthetic
  source 1..21: mol_type = other DNA
gggatgaggctggtgtactcg

SEQ ID NO: 13801 - DNA, 21 bp, synthetic construct
  misc_feature 1..21: note = Synthetic
  source 1..21: mol_type = other DNA
gggatgcaggtggagctgttg

SEQ ID NO: 13802 - DNA, 21 bp, synthetic construct
  misc_feature 1..21: note = Synthetic
  source 1..21: mol_type = other DNA
gggattacaggcgtgagccac

SEQ ID NO: 13803 - DNA, 21 bp, synthetic construct
  misc_feature 1..21: note = Synthetic
  source 1..21: mol_type = other DNA
gggattacaggcgtgaggcac

SEQ ID NO: 13804 - DNA, 21 bp, synthetic construct
  misc_feature 1..21: note = Synthetic
  source 1..21: mol_type = other DNA
gggcaaaggctaacctggctg

SEQ ID NO: 13805 - DNA, 21 bp, synthetic construct
  misc_feature 1..21: note = Synthetic
  source 1..21: mol_type = other DNA
gggcacaggcactcgtagccg

SEQ ID NO: 13806 - DNA, 21 bp, synthetic construct
  misc_feature 1..21: note = Synthetic
  source 1..21: mol_type = other DNA
gggcaccaggctggtgtcctg

SEQ ID NO: 13807 - DNA, 21 bp, synthetic construct
  misc_feature 1..21: note = Synthetic
  source 1..21: mol_type = other DNA
gggcactgtccgaagcctgtt

SEQ ID NO: 13808 - DNA, 21 bp, synthetic construct
  misc_feature 1..21: note = Synthetic
  source 1..21: mol_type = other DNA
gggcaggaggcctcgtctgag

SEQ ID NO: 13809 - DNA, 21 bp, synthetic construct
  misc_feature 1..21: note = Synthetic
  source 1..21: mol_type = other DNA
gggcaggcgcaggtaaacttg

SEQ ID NO: 13810 - DNA, 21 bp, synthetic construct
  misc_feature 1..21: note = Synthetic
  source 1..21: mol_type = other DNA
gggcagggacgggactccagg

SEQ ID NO: 13811 - DNA, 21 bp, synthetic construct
  misc_feature 1..21: note = Synthetic
  source 1..21: mol_type = other DNA
gggcagggaggcacagatact

SEQ ID NO: 13812 - DNA, 21 bp, synthetic construct
  misc_feature 1..21: note = Synthetic
  source 1..21: mol_type = other DNA
gggccaccagctggaagccgt

SEQ ID NO: 13813 - DNA, 21 bp, synthetic construct
  misc_feature 1..21: note = Synthetic
  source 1..21: mol_type = other DNA
gggccaccatcacagcgccag

SEQ ID NO: 13814 - DNA, 21 bp, synthetic construct
  misc_feature 1..21: note = Synthetic
  source 1..21: mol_type = other DNA
gggccactgaatgttttcagt

SEQ ID NO: 13815 - DNA, 21 bp, synthetic construct
  misc_feature 1..21: note = Synthetic
  source 1..21: mol_type = other DNA
gggccagcctcttttcatcct

SEQ ID NO: 13816 - DNA, 21 bp, synthetic construct
  misc_feature 1..21: note = Synthetic
  source 1..21: mol_type = other DNA
gggccagggggtcccgttggt

SEQ ID NO: 13817 - DNA, 21 bp, synthetic construct
  misc_feature 1..21: note = Synthetic
  source 1..21: mol_type = other DNA
gggcccaggataacggagggc

SEQ ID NO: 13818 - DNA, 21 bp, synthetic construct
  misc_feature 1..21: note = Synthetic
  source 1..21: mol_type = other DNA
gggccccatgctcgcagcctc

SEQ ID NO: 13819 - DNA, 21 bp, synthetic construct
  misc_feature 1..21: note = Synthetic
  source 1..21: mol_type = other DNA
gggccccgagaatagtcactg

SEQ ID NO: 13820 - DNA, 21 bp, synthetic construct
  misc_feature 1..21: note = Synthetic
  source 1..21: mol_type = other DNA
gggcccctctgtgaacttgat

SEQ ID NO: 13821 - DNA, 21 bp, synthetic construct
  misc_feature 1..21: note = Synthetic
  source 1..21: mol_type = other DNA
gggcctgacatcccctcccct

SEQ ID NO: 13822 - DNA, 21 bp, synthetic construct
  misc_feature 1..21: note = Synthetic
  source 1..21: mol_type = other DNA
gggcctggatgtctctgctga

SEQ ID NO: 13823 - DNA, 21 bp, synthetic construct
  misc_feature 1..21: note = Synthetic
  source 1..21: mol_type = other DNA
gggcctgtttctcttatcctt

SEQ ID NO: 13824 - DNA, 21 bp, synthetic construct
  misc_feature 1..21: note = Synthetic
  source 1..21: mol_type = other DNA
gggcgacaggtggccacagcg

SEQ ID NO: 13825 - DNA, 21 bp, synthetic construct
  misc_feature 1..21: note = Synthetic
  source 1..21: mol_type = other DNA
gggcgacaggtggccacagga

SEQ ID NO: 13826 - DNA, 21 bp, synthetic construct
  misc_feature 1..21: note = Synthetic
  source 1..21: mol_type = other DNA
gggcgactcgtgtatgtcgcg

SEQ ID NO: 13827 - DNA, 21 bp, synthetic construct
  misc_feature 1..21: note = Synthetic
  source 1..21: mol_type = other DNA
gggcgagggcgccccccagga

SEQ ID NO: 13828 - DNA, 21 bp, synthetic construct
  misc_feature 1..21: note = Synthetic
  source 1..21: mol_type = other DNA
gggcgagtgggggttgatctg

SEQ ID NO: 13829 - DNA, 21 bp, synthetic construct
  misc_feature 1..21: note = Synthetic
  source 1..21: mol_type = other DNA
gggcgccccccaggacaaggt

SEQ ID NO: 13830 - DNA, 21 bp, synthetic construct
  misc_feature 1..21: note = Synthetic
  source 1..21: mol_type = other DNA
gggcggacataaagacgacaa

SEQ ID NO: 13831 - DNA, 21 bp, synthetic construct
  misc_feature 1..21: note = Synthetic
  source 1..21: mol_type = other DNA
gggcggggagattctgaggca

SEQ ID NO: 13832 - DNA, 21 bp, synthetic construct
  misc_feature 1..21: note = Synthetic
  source 1..21: mol_type = other DNA
gggctactgtccccttggaac

SEQ ID NO: 13833 - DNA, 21 bp, synthetic construct
  misc_feature 1..21: note = Synthetic
  source 1..21: mol_type = other DNA
gggctcaggcgatcctcctgc

SEQ ID NO: 13834 - DNA, 21 bp, synthetic construct
  misc_feature 1..21: note = Synthetic
  source 1..21: mol_type = other DNA
gggctctgtcaagctgggtgc

SEQ ID NO: 13835 - DNA, 21 bp, synthetic construct
  misc_feature 1..21: note = Synthetic
  source 1..21: mol_type = other DNA
gggctgctgatgcaccatgca

SEQ ID NO: 13836 - DNA, 21 bp, synthetic construct
  misc_feature 1..21: note = Synthetic
  source 1..21: mol_type = other DNA
gggctggtggggcgagggcgc

SEQ ID NO: 13837 - DNA, 21 bp, synthetic construct
  misc_feature 1..21: note = Synthetic
  source 1..21: mol_type = other DNA
gggcttcttctcatttcctct

SEQ ID NO: 13838 - DNA, 21 bp, synthetic construct
  misc_feature 1..21: note = Synthetic
  source 1..21: mol_type = other DNA
gggctttccctggcctgggat

SEQ ID NO: 13839 - DNA, 21 bp, synthetic construct
  misc_feature 1..21: note = Synthetic
  source 1..21: mol_type = other DNA
ggggaagtgaatggcttggag

SEQ ID NO: 13840 - DNA, 21 bp, synthetic construct
  misc_feature 1..21: note = Synthetic
  source 1..21: mol_type = other DNA
ggggacaattgccaatccctt

SEQ ID NO: 13841 - DNA, 21 bp, synthetic construct
  misc_feature 1..21: note = Synthetic
  source 1..21: mol_type = other DNA
ggggacacagtgttttgtccc

SEQ ID NO: 13842 - DNA, 21 bp, synthetic construct
  misc_feature 1..21: note = Synthetic
  source 1..21: mol_type = other DNA
ggggacagccttgctcgtctg

SEQ ID NO: 13843 - DNA, 21 bp, synthetic construct
  misc_feature 1..21: note = Synthetic
  source 1..21: mol_type = other DNA
ggggacagtaggttttcagcc

SEQ ID NO: 13844 - DNA, 21 bp, synthetic construct
  misc_feature 1..21: note = Synthetic
  source 1..21: mol_type = other DNA
ggggacatcattctcccaaaa

SEQ ID NO: 13845 - DNA, 21 bp, synthetic construct
  misc_feature 1..21: note = Synthetic
  source 1..21: mol_type = other DNA
ggggacccgggacttgtcgtc

SEQ ID NO: 13846 - DNA, 21 bp, synthetic construct
  misc_feature 1..21: note = Synthetic
  source 1..21: mol_type = other DNA
ggggacggaggtgtcgccaca

SEQ ID NO: 13847 - DNA, 21 bp, synthetic construct
  misc_feature 1..21: note = Synthetic
  source 1..21: mol_type = other DNA
ggggacttcgccaggagggcc

SEQ ID NO: 13848 - DNA, 21 bp, synthetic construct
  misc_feature 1..21: note = Synthetic
  source 1..21: mol_type = other DNA
ggggagattctgaggcaacgt

SEQ ID NO: 13849 - DNA, 21 bp, synthetic construct
  misc_feature 1..21: note = Synthetic
  source 1..21: mol_type = other DNA
ggggagcacgtctcctgggac

SEQ ID NO: 13850 - DNA, 21 bp, synthetic construct
  misc_feature 1..21: note = Synthetic
  source 1..21: mol_type = other DNA
ggggaggacaatggacagagc

SEQ ID NO: 13851 - DNA, 21 bp, synthetic construct
  misc_feature 1..21: note = Synthetic
  source 1..21: mol_type = other DNA
ggggatgaggctggtgtactc

SEQ ID NO: 13852 - DNA, 21 bp, synthetic construct
  misc_feature 1..21: note = Synthetic
  source 1..21: mol_type = other DNA
ggggatgcaggtggagctgtt

SEQ ID NO: 13853 - DNA, 21 bp, synthetic construct
  misc_feature 1..21: note = Synthetic
  source 1..21: mol_type = other DNA
ggggcacaggcactcgtagcc

SEQ ID NO: 13854 - DNA, 21 bp, synthetic construct
  misc_feature 1..21: note = Synthetic
  source 1..21: mol_type = other DNA
ggggcagggaggcacagatac

SEQ ID NO: 13855 - DNA, 21 bp, synthetic construct
  misc_feature 1..21: note = Synthetic
  source 1..21: mol_type = other DNA
ggggccaccatcacagcgcca

SEQ ID NO: 13856 - DNA, 21 bp, synthetic construct
  misc_feature 1..21: note = Synthetic
  source 1..21: mol_type = other DNA
ggggcccctctgtgaacttga

SEQ ID NO: 13857 - DNA, 21 bp, synthetic construct
  misc_feature 1..21: note = Synthetic
  source 1..21: mol_type = other DNA
ggggcctggatgtctctgctg

SEQ ID NO: 13858 - DNA, 21 bp, synthetic construct
  misc_feature 1..21: note = Synthetic
  source 1..21: mol_type = other DNA
ggggcgagggcgccccccagg

SEQ ID NO: 13859 - DNA, 21 bp, synthetic construct
  misc_feature 1..21: note = Synthetic
  source 1..21: mol_type = other DNA
ggggcggggagattctgaggc

SEQ ID NO: 13860 - DNA, 21 bp, synthetic construct
  misc_feature 1..21: note = Synthetic
  source 1..21: mol_type = other DNA
ggggctactgtccccttggaa

SEQ ID NO: 13861 - DNA, 21 bp, synthetic construct
  misc_feature 1..21: note = Synthetic
  source 1..21: mol_type = other DNA
ggggctggtggggcgagggcg

SEQ ID NO: 13862 - DNA, 21 bp, synthetic construct
  misc_feature 1..21: note = Synthetic
  source 1..21: mol_type = other DNA
gggggacacagtgttttgtcc

SEQ ID NO: 13863 - DNA, 21 bp, synthetic construct
  misc_feature 1..21: note = Synthetic
  source 1..21: mol_type = other DNA
gggggacagccttgctcgtct

SEQ ID NO: 13864 - DNA, 21 bp, synthetic construct
  misc_feature 1..21: note = Synthetic
  source 1..21: mol_type = other DNA
gggggagcacgtctcctggga

SEQ ID NO: 13865 - DNA, 21 bp, synthetic construct
  misc_feature 1..21: note = Synthetic
  source 1..21: mol_type = other DNA
gggggatgcaggtggagctgt

SEQ ID NO: 13866 - DNA, 21 bp, synthetic construct
  misc_feature 1..21: note = Synthetic
  source 1..21: mol_type = other DNA
gggggcccctctgtgaacttg

SEQ ID NO: 13867 - DNA, 21 bp, synthetic construct
  misc_feature 1..21: note = Synthetic
  source 1..21: mol_type = other DNA
gggggcctggatgtctctgct

SEQ ID NO: 13868 - DNA, 21 bp, synthetic construct
  misc_feature 1..21: note = Synthetic
  source 1..21: mol_type = other DNA
ggggggacacagtgttttgtc

SEQ ID NO: 13869 - DNA, 21 bp, synthetic construct
  misc_feature 1..21: note = Synthetic
  source 1..21: mol_type = other DNA
ggggggacagccttgctcgtc

SEQ ID NO: 13870 - DNA, 21 bp, synthetic construct
  misc_feature 1..21: note = Synthetic
  source 1..21: mol_type = other DNA
gggggggacacagtgttttgt

SEQ ID NO: 13871 - DNA, 21 bp, synthetic construct
  misc_feature 1..21: note = Synthetic
  source 1..21: mol_type = other DNA
gggggtccagctggaagcctt

SEQ ID NO: 13872 - DNA, 21 bp, synthetic construct
  misc_feature 1..21: note = Synthetic
  source 1..21: mol_type = other DNA
gggggtcccgttggtgccatc

SEQ ID NO: 13873 - DNA, 21 bp, synthetic construct
  misc_feature 1..21: note = Synthetic
  source 1..21: mol_type = other DNA
gggggtgacagggcaaaggct

SEQ ID NO: 13874 - DNA, 21 bp, synthetic construct
  misc_feature 1..21: note = Synthetic
  source 1..21: mol_type = other DNA
gggggttgatctgcggggcag

SEQ ID NO: 13875 - DNA, 21 bp, synthetic construct
  misc_feature 1..21: note = Synthetic
  source 1..21: mol_type = other DNA
ggggtagctgtagccgtcctg

SEQ ID NO: 13876 - DNA, 21 bp, synthetic construct
  misc_feature 1..21: note = Synthetic
  source 1..21: mol_type = other DNA
ggggtccagctggaagccttc

SEQ ID NO: 13877 - DNA, 21 bp, synthetic construct
  misc_feature 1..21: note = Synthetic
  source 1..21: mol_type = other DNA
ggggtcccgttggtgccatct

SEQ ID NO: 13878 - DNA, 21 bp, synthetic construct
  misc_feature 1..21: note = Synthetic
  source 1..21: mol_type = other DNA
ggggtcgggaggatgggcacc

SEQ ID NO: 13879 - DNA, 21 bp, synthetic construct
  misc_feature 1..21: note = Synthetic
  source 1..21: mol_type = other DNA
ggggtcgttgtcgcaggccca

SEQ ID NO: 13880 - DNA, 21 bp, synthetic construct
  misc_feature 1..21: note = Synthetic
  source 1..21: mol_type = other DNA
ggggtcttactatgttgccca

SEQ ID NO: 13881 - DNA, 21 bp, synthetic construct
  misc_feature 1..21: note = Synthetic
  source 1..21: mol_type = other DNA
ggggtgacagggcaaaggcta

SEQ ID NO: 13882 - DNA, 21 bp, synthetic construct
  misc_feature 1..21: note = Synthetic
  source 1..21: mol_type = other DNA
ggggtggccccaggcagccgg

SEQ ID NO: 13883 - DNA, 21 bp, synthetic construct
  misc_feature 1..21: note = Synthetic
  source 1..21: mol_type = other DNA
ggggtgggccagcctcttttc

SEQ ID NO: 13884 - DNA, 21 bp, synthetic construct
  misc_feature 1..21: note = Synthetic
  source 1..21: mol_type = other DNA
ggggttgatctgcggggcagg

SEQ ID NO: 13885 - DNA, 21 bp, synthetic construct
  misc_feature 1..21: note = Synthetic
  source 1..21: mol_type = other DNA
ggggttgtcaaagttgatgct

SEQ ID NO: 13886 - DNA, 21 bp, synthetic construct
  misc_feature 1..21: note = Synthetic
  source 1..21: mol_type = other DNA
ggggtttcacgtgttagccag

SEQ ID NO: 13887 - DNA, 21 bp, synthetic construct
  misc_feature 1..21: note = Synthetic
  source 1..21: mol_type = other DNA
ggggtttggcttagagattgg

SEQ ID NO: 13888 - DNA, 21 bp, synthetic construct
  misc_feature 1..21: note = Synthetic
  source 1..21: mol_type = other DNA
gggtagctgtagccgtcctgg

SEQ ID NO: 13889 - DNA, 21 bp, synthetic construct
  misc_feature 1..21: note = Synthetic
  source 1..21: mol_type = other DNA
gggtaggggtcgggaggatgg

SEQ ID NO: 13890 - DNA, 21 bp, synthetic construct
  misc_feature 1..21: note = Synthetic
  source 1..21: mol_type = other DNA
gggtcatgattcgggggtgac

SEQ ID NO: 13891 - DNA, 21 bp, synthetic construct
  misc_feature 1..21: note = Synthetic
  source 1..21: mol_type = other DNA
gggtccagctggaagccttcc

SEQ ID NO: 13892 - DNA, 21 bp, synthetic construct
  misc_feature 1..21: note = Synthetic
  source 1..21: mol_type = other DNA
gggtcccgttggtgccatctg

SEQ ID NO: 13893 - DNA, 21 bp, synthetic construct
  misc_feature 1..21: note = Synthetic
  source 1..21: mol_type = other DNA
gggtccctcgcagagtgtcac

SEQ ID NO: 13894 - DNA, 21 bp, synthetic construct
  misc_feature 1..21: note = Synthetic
  source 1..21: mol_type = other DNA
gggtccctcgcagagtgtcag

SEQ ID NO: 13895 - DNA, 21 bp, synthetic construct
  misc_feature 1..21: note = Synthetic
  source 1..21: mol_type = other DNA
gggtcgggaggatgggcacca

SEQ ID NO: 13896 - DNA, 21 bp, synthetic construct
  misc_feature 1..21: note = Synthetic
  source 1..21: mol_type = other DNA
gggtcgttgtcgcaggcccac

SEQ ID NO: 13897 - DNA, 21 bp, synthetic construct
  misc_feature 1..21: note = Synthetic
  source 1..21: mol_type = other DNA
gggtcttactatgttgcccag

SEQ ID NO: 13898 - DNA, 21 bp, synthetic construct
  misc_feature 1..21: note = Synthetic
  source 1..21: mol_type = other DNA
gggtcttcatctgttgcccag

SEQ ID NO: 13899 - DNA, 21 bp, synthetic construct
  misc_feature 1..21: note = Synthetic
  source 1..21: mol_type = other DNA
gggtgacagggcaaaggctaa

SEQ ID NO: 13900 - DNA, 21 bp, synthetic construct
  misc_feature 1..21: note = Synthetic
  source 1..21: mol_type = other DNA
gggtgaccagtgactcaggct

SEQ ID NO: 13901 - DNA, 21 bp, synthetic construct
  misc_feature 1..21: note = Synthetic
  source 1..21: mol_type = other DNA
gggtgaggttgtggaagagaa

SEQ ID NO: 13902 - DNA, 21 bp, synthetic construct
  misc_feature 1..21: note = Synthetic
  source 1..21: mol_type = other DNA
gggtgatgcattcgccgctgt

SEQ ID NO: 13903 - DNA, 21 bp, synthetic construct
  misc_feature 1..21: note = Synthetic
  source 1..21: mol_type = other DNA
gggtgatgccattgggccact

SEQ ID NO: 13904 - DNA, 21 bp, synthetic construct
  misc_feature 1..21: note = Synthetic
  source 1..21: mol_type = other DNA
gggtgcaggccacgtgtcctc

SEQ ID NO: 13905 - DNA, 21 bp, synthetic construct
  misc_feature 1..21: note = Synthetic
  source 1..21: mol_type = other DNA
gggtgctgcagatcattctct

SEQ ID NO: 13906 - DNA, 21 bp, synthetic construct
  misc_feature 1..21: note = Synthetic
  source 1..21: mol_type = other DNA
gggtggccactgcagcctcag

SEQ ID NO: 13907 - DNA, 21 bp, synthetic construct
  misc_feature 1..21: note = Synthetic
  source 1..21: mol_type = other DNA
gggtggccccaggcagccggg

SEQ ID NO: 13908 - DNA, 21 bp, synthetic construct
  misc_feature 1..21: note = Synthetic
  source 1..21: mol_type = other DNA
gggtggccgggggcccctctg

SEQ ID NO: 13909 - DNA, 21 bp, synthetic construct
  misc_feature 1..21: note = Synthetic
  source 1..21: mol_type = other DNA
gggtgggccagcctcttttca

SEQ ID NO: 13910 - DNA, 21 bp, synthetic construct
  misc_feature 1..21: note = Synthetic
  source 1..21: mol_type = other DNA
gggtgggtcatgattcggggg

SEQ ID NO: 13911 - DNA, 21 bp, synthetic construct
  misc_feature 1..21: note = Synthetic
  source 1..21: mol_type = other DNA
gggtggtcctctcacaccagt

SEQ ID NO: 13912 - DNA, 21 bp, synthetic construct
  misc_feature 1..21: note = Synthetic
  source 1..21: mol_type = other DNA
gggtggttgtgtgctgtgtcc

SEQ ID NO: 13913 - DNA, 21 bp, synthetic construct
  misc_feature 1..21: note = Synthetic
  source 1..21: mol_type = other DNA
gggtgtctcaggcacttaata

SEQ ID NO: 13914 - DNA, 21 bp, synthetic construct
  misc_feature 1..21: note = Synthetic
  source 1..21: mol_type = other DNA
gggttcacaccattctcctgc

SEQ ID NO: 13915 - DNA, 21 bp, synthetic construct
  misc_feature 1..21: note = Synthetic
  source 1..21: mol_type = other DNA
gggttcatctgaccagtcccg

SEQ ID NO: 13916 - DNA, 21 bp, synthetic construct
  misc_feature 1..21: note = Synthetic
  source 1..21: mol_type = other DNA
gggttctgggcagggacggga

SEQ ID NO: 13917 - DNA, 21 bp, synthetic construct
  misc_feature 1..21: note = Synthetic
  source 1..21: mol_type = other DNA
gggttgatctgcggggcaggg

SEQ ID NO: 13918 - DNA, 21 bp, synthetic construct
  misc_feature 1..21: note = Synthetic
  source 1..21: mol_type = other DNA
gggttgtcaaagttgatgctg

SEQ ID NO: 13919 - DNA, 21 bp, synthetic construct
  misc_feature 1..21: note = Synthetic
  source 1..21: mol_type = other DNA
gggtttcacgtgttagccagg

SEQ ID NO: 13920 - DNA, 21 bp, synthetic construct
  misc_feature 1..21: note = Synthetic
  source 1..21: mol_type = other DNA
gggtttgcaaaaataaataga

SEQ ID NO: 13921 - DNA, 21 bp, synthetic construct
  misc_feature 1..21: note = Synthetic
  source 1..21: mol_type = other DNA
gggtttggcttagagattggt

SEQ ID NO: 13922 - DNA, 21 bp, synthetic construct
  misc_feature 1..21: note = Synthetic
  source 1..21: mol_type = other DNA
ggtaaacacgttgactcctga

SEQ ID NO: 13923 - DNA, 21 bp, synthetic construct
  misc_feature 1..21: note = Synthetic
  source 1..21: mol_type = other DNA
ggtaaacttgggcgagtgggg

SEQ ID NO: 13924 - DNA, 21 bp, synthetic construct
  misc_feature 1..21: note = Synthetic
  source 1..21: mol_type = other DNA
ggtaaccgggtgtctcaggca

SEQ ID NO: 13925 - DNA, 21 bp, synthetic construct
  misc_feature 1..21: note = Synthetic
  source 1..21: mol_type = other DNA
ggtacaaacccacctcgaaag

SEQ ID NO: 13926 - DNA, 21 bp, synthetic construct
  misc_feature 1..21: note = Synthetic
  source 1..21: mol_type = other DNA
ggtagctgtagccgtcctggt

SEQ ID NO: 13927 - DNA, 21 bp, synthetic construct
  misc_feature 1..21: note = Synthetic
  source 1..21: mol_type = other DNA
ggtaggcgatggagcccacag

SEQ ID NO: 13928 - DNA, 21 bp, synthetic construct
  misc_feature 1..21: note = Synthetic
  source 1..21: mol_type = other DNA
ggtaggggtcgggaggatggg

SEQ ID NO: 13929 - DNA, 21 bp, synthetic construct
  misc_feature 1..21: note = Synthetic
  source 1..21: mol_type = other DNA
ggtatccgcaacagagacagt

SEQ ID NO: 13930 - DNA, 21 bp, synthetic construct
  misc_feature 1..21: note = Synthetic
  source 1..21: mol_type = other DNA
ggtcaacctgcccctctctgt

SEQ ID NO: 13931 - DNA, 21 bp, synthetic construct
  misc_feature 1..21: note = Synthetic
  source 1..21: mol_type = other DNA
ggtcacactgccggctgccat

SEQ ID NO: 13932 - DNA, 21 bp, synthetic construct
  misc_feature 1..21: note = Synthetic
  source 1..21: mol_type = other DNA
ggtcagaccagtagattctat

SEQ ID NO: 13933 - DNA, 21 bp, synthetic construct
  misc_feature 1..21: note = Synthetic
  source 1..21: mol_type = other DNA
ggtcatgattcgggggtgaca

SEQ ID NO: 13934 - DNA, 21 bp, synthetic construct
  misc_feature 1..21: note = Synthetic
  source 1..21: mol_type = other DNA
ggtcattgcagacgtgggaac

SEQ ID NO: 13935 - DNA, 21 bp, synthetic construct
  misc_feature 1..21: note = Synthetic
  source 1..21: mol_type = other DNA
ggtccagcgcaatttccagcc

SEQ ID NO: 13936 - DNA, 21 bp, synthetic construct
  misc_feature 1..21: note = Synthetic
  source 1..21: mol_type = other DNA
ggtccagcgtcatcttcctga

SEQ ID NO: 13937 - DNA, 21 bp, synthetic construct
  misc_feature 1..21: note = Synthetic
  source 1..21: mol_type = other DNA
ggtccagctggaagccttcct

SEQ ID NO: 13938 - DNA, 21 bp, synthetic construct
  misc_feature 1..21: note = Synthetic
  source 1..21: mol_type = other DNA
ggtccagtagatgttgctgtg

SEQ ID NO: 13939 - DNA, 21 bp, synthetic construct
  misc_feature 1..21: note = Synthetic
  source 1..21: mol_type = other DNA
ggtccccccgggcctgtttct

SEQ ID NO: 13940 - DNA, 21 bp, synthetic construct
  misc_feature 1..21: note = Synthetic
  source 1..21: mol_type = other DNA
ggtcccgcactctttgatggg

SEQ ID NO: 13941 - DNA, 21 bp, synthetic construct
  misc_feature 1..21: note = Synthetic
  source 1..21: mol_type = other DNA
ggtcccgttggtgccatctgc

SEQ ID NO: 13942 - DNA, 21 bp, synthetic construct
  misc_feature 1..21: note = Synthetic
  source 1..21: mol_type = other DNA
ggtccctcgcagagtgtcaca

SEQ ID NO: 13943 - DNA, 21 bp, synthetic construct
  misc_feature 1..21: note = Synthetic
  source 1..21: mol_type = other DNA
ggtccctcgcagagtgtcaga

SEQ ID NO: 13944 - DNA, 21 bp, synthetic construct
  misc_feature 1..21: note = Synthetic
  source 1..21: mol_type = other DNA
ggtcctctcacaccagttcac

SEQ ID NO: 13945 - DNA, 21 bp, synthetic construct
  misc_feature 1..21: note = Synthetic
  source 1..21: mol_type = other DNA
ggtcgggaggatgggcaccag

SEQ ID NO: 13946 - DNA, 21 bp, synthetic construct
  misc_feature 1..21: note = Synthetic
  source 1..21: mol_type = other DNA
ggtcgggtggttgtgtgctgt

SEQ ID NO: 13947 - DNA, 21 bp, synthetic construct
  misc_feature 1..21: note = Synthetic
  source 1..21: mol_type = other DNA
ggtcgttgtcgcaggcccaca

SEQ ID NO: 13948 - DNA, 21 bp, synthetic construct
  misc_feature 1..21: note = Synthetic
  source 1..21: mol_type = other DNA
ggtctcaggaagggttctggg

SEQ ID NO: 13949 - DNA, 21 bp, synthetic construct
  misc_feature 1..21: note = Synthetic
  source 1..21: mol_type = other DNA
ggtctccaactcctgaactca

SEQ ID NO: 13950 - DNA, 21 bp, synthetic construct
  misc_feature 1..21: note = Synthetic
  source 1..21: mol_type = other DNA
ggtctcgatctcctgacctca

SEQ ID NO: 13951 - DNA, 21 bp, synthetic construct
  misc_feature 1..21: note = Synthetic
  source 1..21: mol_type = other DNA
ggtctcggtgccaccacggat

SEQ ID NO: 13952 - DNA, 21 bp, synthetic construct
  misc_feature 1..21: note = Synthetic
  source 1..21: mol_type = other DNA
ggtctgagtcacagacgaact

SEQ ID NO: 13953 - DNA, 21 bp, synthetic construct
  misc_feature 1..21: note = Synthetic
  source 1..21: mol_type = other DNA
ggtcttactatgttgcccagg

SEQ ID NO: 13954 - DNA, 21 bp, synthetic construct
  misc_feature 1..21: note = Synthetic
  source 1..21: mol_type = other DNA
ggtcttcatctgttgcccagg

SEQ ID NO: 13955 - DNA, 21 bp, synthetic construct
  misc_feature 1..21: note = Synthetic
  source 1..21: mol_type = other DNA
ggtcttccggttgcccccgtt

SEQ ID NO: 13956 - DNA, 21 bp, synthetic construct
  misc_feature 1..21: note = Synthetic
  source 1..21: mol_type = other DNA
ggtcttctctgtctttgaata

SEQ ID NO: 13957 - DNA, 21 bp, synthetic construct
  misc_feature 1..21: note = Synthetic
  source 1..21: mol_type = other DNA
ggtcttctgatagacggggtt

SEQ ID NO: 13958 - DNA, 21 bp, synthetic construct
  misc_feature 1..21: note = Synthetic
  source 1..21: mol_type = other DNA
ggtgaagaagaggtaggcgat

SEQ ID NO: 13959 - DNA, 21 bp, synthetic construct
  misc_feature 1..21: note = Synthetic
  source 1..21: mol_type = other DNA
ggtgaatgagtttggtctcgg

SEQ ID NO: 13960 - DNA, 21 bp, synthetic construct
  misc_feature 1..21: note = Synthetic
  source 1..21: mol_type = other DNA
ggtgacagacaagcacgtctc

SEQ ID NO: 13961 - DNA, 21 bp, synthetic construct
  misc_feature 1..21: note = Synthetic
  source 1..21: mol_type = other DNA
ggtgacagggcaaaggctaac

SEQ ID NO: 13962 - DNA, 21 bp, synthetic construct
  misc_feature 1..21: note = Synthetic
  source 1..21: mol_type = other DNA
ggtgaccagtgactcaggctc

SEQ ID NO: 13963 - DNA, 21 bp, synthetic construct
  misc_feature 1..21: note = Synthetic
  source 1..21: mol_type = other DNA
ggtgagacattgtcactatct

SEQ ID NO: 13964 - DNA, 21 bp, synthetic construct
  misc_feature 1..21: note = Synthetic
  source 1..21: mol_type = other DNA
ggtgagcaccgggcaggaggc

SEQ ID NO: 13965 - DNA, 21 bp, synthetic construct
  misc_feature 1..21: note = Synthetic
  source 1..21: mol_type = other DNA
ggtgagcccaggggtggcccc

SEQ ID NO: 13966 - DNA, 21 bp, synthetic construct
  misc_feature 1..21: note = Synthetic
  source 1..21: mol_type = other DNA
ggtgaggttgtggaagagaac

SEQ ID NO: 13967 - DNA, 21 bp, synthetic construct
  misc_feature 1..21: note = Synthetic
  source 1..21: mol_type = other DNA
ggtgatgcattcgccgctgtg

SEQ ID NO: 13968 - DNA, 21 bp, synthetic construct
  misc_feature 1..21: note = Synthetic
  source 1..21: mol_type = other DNA
ggtgatgccattgggccactg

SEQ ID NO: 13969 - DNA, 21 bp, synthetic construct
  misc_feature 1..21: note = Synthetic
  source 1..21: mol_type = other DNA
ggtgcaggccacgtgtcctca

SEQ ID NO: 13970 - DNA, 21 bp, synthetic construct
  misc_feature 1..21: note = Synthetic
  source 1..21: mol_type = other DNA
ggtgccaccacggattcagcc

SEQ ID NO: 13971 - DNA, 21 bp, synthetic construct
  misc_feature 1..21: note = Synthetic
  source 1..21: mol_type = other DNA
ggtgccatctgctgttgtgtg

SEQ ID NO: 13972 - DNA, 21 bp, synthetic construct
  misc_feature 1..21: note = Synthetic
  source 1..21: mol_type = other DNA
ggtgcccgccaccacgcccgg

SEQ ID NO: 13973 - DNA, 21 bp, synthetic construct
  misc_feature 1..21: note = Synthetic
  source 1..21: mol_type = other DNA
ggtgctgcagatcattctctg

SEQ ID NO: 13974 - DNA, 21 bp, synthetic construct
  misc_feature 1..21: note = Synthetic
  source 1..21: mol_type = other DNA
ggtggagagaaactcaaaact

SEQ ID NO: 13975 - DNA, 21 bp, synthetic construct
  misc_feature 1..21: note = Synthetic
  source 1..21: mol_type = other DNA
ggtggagctgttgcactggaa

SEQ ID NO: 13976 - DNA, 21 bp, synthetic construct
  misc_feature 1..21: note = Synthetic
  source 1..21: mol_type = other DNA
ggtggatgaggcagggccagg

SEQ ID NO: 13977 - DNA, 21 bp, synthetic construct
  misc_feature 1..21: note = Synthetic
  source 1..21: mol_type = other DNA
ggtggatgtctcctgggtggc

SEQ ID NO: 13978 - DNA, 21 bp, synthetic construct
  misc_feature 1..21: note = Synthetic
  source 1..21: mol_type = other DNA
ggtggccacagcgcagttttc

SEQ ID NO: 13979 - DNA, 21 bp, synthetic construct
  misc_feature 1..21: note = Synthetic
  source 1..21: mol_type = other DNA
ggtggccacaggacagccttg

SEQ ID NO: 13980 - DNA, 21 bp, synthetic construct
  misc_feature 1..21: note = Synthetic
  source 1..21: mol_type = other DNA
ggtggccactgcagcctcagc

SEQ ID NO: 13981 - DNA, 21 bp, synthetic construct
  misc_feature 1..21: note = Synthetic
  source 1..21: mol_type = other DNA
ggtggccccaggcagccggga

SEQ ID NO: 13982 - DNA, 21 bp, synthetic construct
  misc_feature 1..21: note = Synthetic
  source 1..21: mol_type = other DNA
ggtggccgggggcccctctgt

SEQ ID NO: 13983 - DNA, 21 bp, synthetic construct
  misc_feature 1..21: note = Synthetic
  source 1..21: mol_type = other DNA
ggtgggccagcctcttttcat

SEQ ID NO: 13984 - DNA, 21 bp, synthetic construct
  misc_feature 1..21: note = Synthetic
  source 1..21: mol_type = other DNA
ggtgggcggacataaagacga

SEQ ID NO: 13985 - DNA, 21 bp, synthetic construct
  misc_feature 1..21: note = Synthetic
  source 1..21: mol_type = other DNA
ggtggggacggaggtgtcgcc

SEQ ID NO: 13986 - DNA, 21 bp, synthetic construct
  misc_feature 1..21: note = Synthetic
  source 1..21: mol_type = other DNA
ggtggggcgagggcgcccccc

SEQ ID NO: 13987 - DNA, 21 bp, synthetic construct
  misc_feature 1..21: note = Synthetic
  source 1..21: mol_type = other DNA
ggtgggtcatgattcgggggt

SEQ ID NO: 13988 - DNA, 21 bp, synthetic construct
  misc_feature 1..21: note = Synthetic
  source 1..21: mol_type = other DNA
ggtggtcctctcacaccagtt

SEQ ID NO: 13989 - DNA, 21 bp, synthetic construct
  misc_feature 1..21: note = Synthetic
  source 1..21: mol_type = other DNA
ggtggttgtgtgctgtgtcct

SEQ ID NO: 13990 - DNA, 21 bp, synthetic construct
  misc_feature 1..21: note = Synthetic
  source 1..21: mol_type = other DNA
ggtgtactcgctccggtccag

SEQ ID NO: 13991 - DNA, 21 bp, synthetic construct
  misc_feature 1..21: note = Synthetic
  source 1..21: mol_type = other DNA
ggtgtcataggaagagacgcc

SEQ ID NO: 13992 - DNA, 21 bp, synthetic construct
  misc_feature 1..21: note = Synthetic
  source 1..21: mol_type = other DNA
ggtgtcatcctggtccccccg

SEQ ID NO: 13993 - DNA, 21 bp, synthetic construct
  misc_feature 1..21: note = Synthetic
  source 1..21: mol_type = other DNA
ggtgtcctgacagccacacct

SEQ ID NO: 13994 - DNA, 21 bp, synthetic construct
  misc_feature 1..21: note = Synthetic
  source 1..21: mol_type = other DNA
ggtgtcgccacagagcacagc

SEQ ID NO: 13995 - DNA, 21 bp, synthetic construct
  misc_feature 1..21: note = Synthetic
  source 1..21: mol_type = other DNA
ggtgtcgggaacaggtcgggt

SEQ ID NO: 13996 - DNA, 21 bp, synthetic construct
  misc_feature 1..21: note = Synthetic
  source 1..21: mol_type = other DNA
ggtgtcgggatcctgacactc

SEQ ID NO: 13997 - DNA, 21 bp, synthetic construct
  misc_feature 1..21: note = Synthetic
  source 1..21: mol_type = other DNA
ggtgtctcaggcacttaataa

SEQ ID NO: 13998 - DNA, 21 bp, synthetic construct
  misc_feature 1..21: note = Synthetic
  source 1..21: mol_type = other DNA
ggttcacaccattctcctgcc

SEQ ID NO: 13999 - DNA, 21 bp, synthetic construct
  misc_feature 1..21: note = Synthetic
  source 1..21: mol_type = other DNA
ggttcacgcagagctggctgc

SEQ ID NO: 14000 - DNA, 21 bp, synthetic construct
  misc_feature 1..21: note = Synthetic
  source 1..21: mol_type = other DNA
ggttcatctgaccagtcccgg

SEQ ID NO: 14001 - DNA, 21 bp, synthetic construct
  misc_feature 1..21: note = Synthetic
  source 1..21: mol_type = other DNA
ggttcatttaagaaatttaat

SEQ ID NO: 14002 - DNA, 21 bp, synthetic construct
  misc_feature 1..21: note = Synthetic
  source 1..21: mol_type = other DNA
ggttccctgcactggggggga

SEQ ID NO: 14003 - DNA, 21 bp, synthetic construct
  misc_feature 1..21: note = Synthetic
  source 1..21: mol_type = other DNA
ggttctgggcagggacgggac

SEQ ID NO: 14004 - DNA, 21 bp, synthetic construct
  misc_feature 1..21: note = Synthetic
  source 1..21: mol_type = other DNA
ggttgacacggcccccacagc

SEQ ID NO: 14005 - DNA, 21 bp, synthetic construct
  misc_feature 1..21: note = Synthetic
  source 1..21: mol_type = other DNA
ggttgatctgcggggcaggga

SEQ ID NO: 14006 - DNA, 21 bp, synthetic construct
  misc_feature 1..21: note = Synthetic
  source 1..21: mol_type = other DNA
ggttgcccccgttgacatcga

SEQ ID NO: 14007 - DNA, 21 bp, synthetic construct
  misc_feature 1..21: note = Synthetic
  source 1..21: mol_type = other DNA
ggttggcactgaaaatggctt

SEQ ID NO: 14008 - DNA, 21 bp, synthetic construct
  misc_feature 1..21: note = Synthetic
  source 1..21: mol_type = other DNA
ggttggggatgaggctggtgt

SEQ ID NO: 14009 - DNA, 21 bp, synthetic construct
  misc_feature 1..21: note = Synthetic
  source 1..21: mol_type = other DNA
ggttggtgaagaagaggtagg

SEQ ID NO: 14010 - DNA, 21 bp, synthetic construct
  misc_feature 1..21: note = Synthetic
  source 1..21: mol_type = other DNA
ggttgtcaaagttgatgctgt

SEQ ID NO: 14011 - DNA, 21 bp, synthetic construct
  misc_feature 1..21: note = Synthetic
  source 1..21: mol_type = other DNA
ggttgtggaagagaaccatat

SEQ ID NO: 14012 - DNA, 21 bp, synthetic construct
  misc_feature 1..21: note = Synthetic
  source 1..21: mol_type = other DNA
ggttgtggcaaatgtggacct

SEQ ID NO: 14013 - DNA, 21 bp, synthetic construct
  misc_feature 1..21: note = Synthetic
  source 1..21: mol_type = other DNA
ggttgtgtgctgtgtccttac

SEQ ID NO: 14014 - DNA, 21 bp, synthetic construct
  misc_feature 1..21: note = Synthetic
  source 1..21: mol_type = other DNA
ggtttaaaaagtgacacccat

SEQ ID NO: 14015 - DNA, 21 bp, synthetic construct
  misc_feature 1..21: note = Synthetic
  source 1..21: mol_type = other DNA
ggtttcacgtgttagccagga

SEQ ID NO: 14016 - DNA, 21 bp, synthetic construct
  misc_feature 1..21: note = Synthetic
  source 1..21: mol_type = other DNA
ggtttgcaaaaataaatagat

SEQ ID NO: 14017 - DNA, 21 bp, synthetic construct
  misc_feature 1..21: note = Synthetic
  source 1..21: mol_type = other DNA
ggtttggcttagagattggtg

SEQ ID NO: 14018 - DNA, 21 bp, synthetic construct
  misc_feature 1..21: note = Synthetic
  source 1..21: mol_type = other DNA
ggttttcagccaacaagttga

SEQ ID NO: 14019 - DNA, 21 bp, synthetic construct
  misc_feature 1..21: note = Synthetic
  source 1..21: mol_type = other DNA
ggtttttgtagagatgggatc

SEQ ID NO: 14020 - DNA, 21 bp, synthetic construct
  misc_feature 1..21: note = Synthetic
  source 1..21: mol_type = other DNA
ggtttttttttgttttttttt

SEQ ID NO: 14021 - DNA, 21 bp, synthetic construct
  misc_feature 1..21: note = Synthetic
  source 1..21: mol_type = other DNA
gtaaacacgttgactcctgag

SEQ ID NO: 14022 - DNA, 21 bp, synthetic construct
  misc_feature 1..21: note = Synthetic
  source 1..21: mol_type = other DNA
gtaaacttgggcgagtggggg

SEQ ID NO: 14023 - DNA, 21 bp, synthetic construct
  misc_feature 1..21: note = Synthetic
  source 1..21: mol_type = other DNA
gtaaagacccctacagcgctg

SEQ ID NO: 14024 - DNA, 21 bp, synthetic construct
  misc_feature 1..21: note = Synthetic
  source 1..21: mol_type = other DNA
gtaacacggcgatttcagaaa

SEQ ID NO: 14025 - DNA, 21 bp, synthetic construct
  misc_feature 1..21: note = Synthetic
  source 1..21: mol_type = other DNA
gtaaccgggtgtctcaggcac

SEQ ID NO: 14026 - DNA, 21 bp, synthetic construct
  misc_feature 1..21: note = Synthetic
  source 1..21: mol_type = other DNA
gtaagacattcaggctacaaa

SEQ ID NO: 14027 - DNA, 21 bp, synthetic construct
  misc_feature 1..21: note = Synthetic
  source 1..21: mol_type = other DNA
gtaaggaaccgaggccttgag

SEQ ID NO: 14028 - DNA, 21 bp, synthetic construct
  misc_feature 1..21: note = Synthetic
  source 1..21: mol_type = other DNA
gtacaaacccacctcgaaaga

SEQ ID NO: 14029 - DNA, 21 bp, synthetic construct
  misc_feature 1..21: note = Synthetic
  source 1..21: mol_type = other DNA
gtacaactctgaactgagaaa

SEQ ID NO: 14030 - DNA, 21 bp, synthetic construct
  misc_feature 1..21: note = Synthetic
  source 1..21: mol_type = other DNA
gtacacagtgtacaactctga

SEQ ID NO: 14031 - DNA, 21 bp, synthetic construct
  misc_feature 1..21: note = Synthetic
  source 1..21: mol_type = other DNA
gtacagggacgcatttacgtg

SEQ ID NO: 14032 - DNA, 21 bp, synthetic construct
  misc_feature 1..21: note = Synthetic
  source 1..21: mol_type = other DNA
gtacataaagaagaggcattt

SEQ ID NO: 14033 - DNA, 21 bp, synthetic construct
  misc_feature 1..21: note = Synthetic
  source 1..21: mol_type = other DNA
gtacatgaagccatgaacagg

SEQ ID NO: 14034 - DNA, 21 bp, synthetic construct
  misc_feature 1..21: note = Synthetic
  source 1..21: mol_type = other DNA
gtacccagctgatttttaact

SEQ ID NO: 14035 - DNA, 21 bp, synthetic construct
  misc_feature 1..21: note = Synthetic
  source 1..21: mol_type = other DNA
gtactcgctccggtccagcgt

SEQ ID NO: 14036 - DNA, 21 bp, synthetic construct
  misc_feature 1..21: note = Synthetic
  source 1..21: mol_type = other DNA
gtagagacggggtttcacgtg

SEQ ID NO: 14037 - DNA, 21 bp, synthetic construct
  misc_feature 1..21: note = Synthetic
  source 1..21: mol_type = other DNA
gtagagatgggatctcgcttt

SEQ ID NO: 14038 - DNA, 21 bp, synthetic construct
  misc_feature 1..21: note = Synthetic
  source 1..21: mol_type = other DNA
gtagaggcggccactgaggag

SEQ ID NO: 14039 - DNA, 21 bp, synthetic construct
  misc_feature 1..21: note = Synthetic
  source 1..21: mol_type = other DNA
gtagatgtccacaccattcag

SEQ ID NO: 14040 - DNA, 21 bp, synthetic construct
  misc_feature 1..21: note = Synthetic
  source 1..21: mol_type = other DNA
gtagatgttgctgtggatcca

SEQ ID NO: 14041 - DNA, 21 bp, synthetic construct
  misc_feature 1..21: note = Synthetic
  source 1..21: mol_type = other DNA
gtagattctattgctggccac

SEQ ID NO: 14042 - DNA, 21 bp, synthetic construct
  misc_feature 1..21: note = Synthetic
  source 1..21: mol_type = other DNA
gtagccaccctccaggttcac

SEQ ID NO: 14043 - DNA, 21 bp, synthetic construct
  misc_feature 1..21: note = Synthetic
  source 1..21: mol_type = other DNA
gtagccgatcttaaggtcatt

SEQ ID NO: 14044 - DNA, 21 bp, synthetic construct
  misc_feature 1..21: note = Synthetic
  source 1..21: mol_type = other DNA
gtagccgtcctggttgtggca

SEQ ID NO: 14045 - DNA, 21 bp, synthetic construct
  misc_feature 1..21: note = Synthetic
  source 1..21: mol_type = other DNA
gtagctgggactacaggtgcc

SEQ ID NO: 14046 - DNA, 21 bp, synthetic construct
  misc_feature 1..21: note = Synthetic
  source 1..21: mol_type = other DNA
gtagctgggatcacaggcacg

SEQ ID NO: 14047 - DNA, 21 bp, synthetic construct
  misc_feature 1..21: note = Synthetic
  source 1..21: mol_type = other DNA
gtagctgtagccgtcctggtt

SEQ ID NO: 14048 - DNA, 21 bp, synthetic construct
  misc_feature 1..21: note = Synthetic
  source 1..21: mol_type = other DNA
gtaggagatgcatttcccgtc

SEQ ID NO: 14049 - DNA, 21 bp, synthetic construct
  misc_feature 1..21: note = Synthetic
  source 1..21: mol_type = other DNA
gtaggcgatggagcccacagc

SEQ ID NO: 14050 - DNA, 21 bp, synthetic construct
  misc_feature 1..21: note = Synthetic
  source 1..21: mol_type = other DNA
gtagggagaggcacgctctgt

SEQ ID NO: 14051 - DNA, 21 bp, synthetic construct
  misc_feature 1..21: note = Synthetic
  source 1..21: mol_type = other DNA
gtaggggtcgggaggatgggc

SEQ ID NO: 14052 - DNA, 21 bp, synthetic construct
  misc_feature 1..21: note = Synthetic
  source 1..21: mol_type = other DNA
gtaggttttcagccaacaagt

SEQ ID NO: 14053 - DNA, 21 bp, synthetic construct
  misc_feature 1..21: note = Synthetic
  source 1..21: mol_type = other DNA
gtatatatatatatataagtg

SEQ ID NO: 14054 - DNA, 21 bp, synthetic construct
  misc_feature 1..21: note = Synthetic
  source 1..21: mol_type = other DNA
gtatccgcaacagagacagtg

SEQ ID NO: 14055 - DNA, 21 bp, synthetic construct
  misc_feature 1..21: note = Synthetic
  source 1..21: mol_type = other DNA
gtatgtcgcggaggcggctcc

SEQ ID NO: 14056 - DNA, 21 bp, synthetic construct
  misc_feature 1..21: note = Synthetic
  source 1..21: mol_type = other DNA
gtatttctgaaatagggtctt

SEQ ID NO: 14057 - DNA, 21 bp, synthetic construct
  misc_feature 1..21: note = Synthetic
  source 1..21: mol_type = other DNA
gtatttttagtagagacgggg

SEQ ID NO: 14058 - DNA, 21 bp, synthetic construct
  misc_feature 1..21: note = Synthetic
  source 1..21: mol_type = other DNA
gtcaaacgatccagactggag

SEQ ID NO: 14059 - DNA, 21 bp, synthetic construct
  misc_feature 1..21: note = Synthetic
  source 1..21: mol_type = other DNA
gtcaaagttgatgctgttgat

SEQ ID NO: 14060 - DNA, 21 bp, synthetic construct
  misc_feature 1..21: note = Synthetic
  source 1..21: mol_type = other DNA
gtcaacccagtagaggcggcc

SEQ ID NO: 14061 - DNA, 21 bp, synthetic construct
  misc_feature 1..21: note = Synthetic
  source 1..21: mol_type = other DNA
gtcaacctgcccctctctgtc

SEQ ID NO: 14062 - DNA, 21 bp, synthetic construct
  misc_feature 1..21: note = Synthetic
  source 1..21: mol_type = other DNA
gtcaagctgggtgctgcagat

SEQ ID NO: 14063 - DNA, 21 bp, synthetic construct
  misc_feature 1..21: note = Synthetic
  source 1..21: mol_type = other DNA
gtcacacagctgcccccgaga

SEQ ID NO: 14064 - DNA, 21 bp, synthetic construct
  misc_feature 1..21: note = Synthetic
  source 1..21: mol_type = other DNA
gtcacactgccggctgccatg

SEQ ID NO: 14065 - DNA, 21 bp, synthetic construct
  misc_feature 1..21: note = Synthetic
  source 1..21: mol_type = other DNA
gtcacagacgaactgccgaga

SEQ ID NO: 14066 - DNA, 21 bp, synthetic construct
  misc_feature 1..21: note = Synthetic
  source 1..21: mol_type = other DNA
gtcacattaacgcagccaact

SEQ ID NO: 14067 - DNA, 21 bp, synthetic construct
  misc_feature 1..21: note = Synthetic
  source 1..21: mol_type = other DNA
gtcaccagcgagtagatgtcc

SEQ ID NO: 14068 - DNA, 21 bp, synthetic construct
  misc_feature 1..21: note = Synthetic
  source 1..21: mol_type = other DNA
gtcacggtggagagaaactca

SEQ ID NO: 14069 - DNA, 21 bp, synthetic construct
  misc_feature 1..21: note = Synthetic
  source 1..21: mol_type = other DNA
gtcactatctccaccgtggtg

SEQ ID NO: 14070 - DNA, 21 bp, synthetic construct
  misc_feature 1..21: note = Synthetic
  source 1..21: mol_type = other DNA
gtcactgaacaaatacagcaa

SEQ ID NO: 14071 - DNA, 21 bp, synthetic construct
  misc_feature 1..21: note = Synthetic
  source 1..21: mol_type = other DNA
gtcactgtctctccggacatc

SEQ ID NO: 14072 - DNA, 21 bp, synthetic construct
  misc_feature 1..21: note = Synthetic
  source 1..21: mol_type = other DNA
gtcagacagccttgctcgtct

SEQ ID NO: 14073 - DNA, 21 bp, synthetic construct
  misc_feature 1..21: note = Synthetic
  source 1..21: mol_type = other DNA
gtcagaccagtagattctatt

SEQ ID NO: 14074 - DNA, 21 bp, synthetic construct
  misc_feature 1..21: note = Synthetic
  source 1..21: mol_type = other DNA
gtcagatttgtccttgcagtc

SEQ ID NO: 14075 - DNA, 21 bp, synthetic construct
  misc_feature 1..21: note = Synthetic
  source 1..21: mol_type = other DNA
gtcagggcgacaggtggccac

SEQ ID NO: 14076 - DNA, 21 bp, synthetic construct
  misc_feature 1..21: note = Synthetic
  source 1..21: mol_type = other DNA
gtcagtccagtacatgaagcc

SEQ ID NO: 14077 - DNA, 21 bp, synthetic construct
  misc_feature 1..21: note = Synthetic
  source 1..21: mol_type = other DNA
gtcataggaagagacgccgtg

SEQ ID NO: 14078 - DNA, 21 bp, synthetic construct
  misc_feature 1..21: note = Synthetic
  source 1..21: mol_type = other DNA
gtcatattcccggtcacactg

SEQ ID NO: 14079 - DNA, 21 bp, synthetic construct
  misc_feature 1..21: note = Synthetic
  source 1..21: mol_type = other DNA
gtcatcctccagactgaccat

SEQ ID NO: 14080 - DNA, 21 bp, synthetic construct
  misc_feature 1..21: note = Synthetic
  source 1..21: mol_type = other DNA
gtcatcctggtccccccgggc

SEQ ID NO: 14081 - DNA, 21 bp, synthetic construct
  misc_feature 1..21: note = Synthetic
  source 1..21: mol_type = other DNA
gtcatcttcctgacctcgtgc

SEQ ID NO: 14082 - DNA, 21 bp, synthetic construct
  misc_feature 1..21: note = Synthetic
  source 1..21: mol_type = other DNA
gtcatgattcgggggtgacag

SEQ ID NO: 14083 - DNA, 21 bp, synthetic construct
  misc_feature 1..21: note = Synthetic
  source 1..21: mol_type = other DNA
gtcattgcagacgtgggaaca

SEQ ID NO: 14084 - DNA, 21 bp, synthetic construct
  misc_feature 1..21: note = Synthetic
  source 1..21: mol_type = other DNA
gtccaaaatactttgtcctca

SEQ ID NO: 14085 - DNA, 21 bp, synthetic construct
  misc_feature 1..21: note = Synthetic
  source 1..21: mol_type = other DNA
gtccaagcagtcccggtctga

SEQ ID NO: 14086 - DNA, 21 bp, synthetic construct
  misc_feature 1..21: note = Synthetic
  source 1..21: mol_type = other DNA
gtccaagcattcgttggtccc

SEQ ID NO: 14087 - DNA, 21 bp, synthetic construct
  misc_feature 1..21: note = Synthetic
  source 1..21: mol_type = other DNA
gtccacaccattcaggccccc

SEQ ID NO: 14088 - DNA, 21 bp, synthetic construct
  misc_feature 1..21: note = Synthetic
  source 1..21: mol_type = other DNA
gtccacagccagcccgtcggg

SEQ ID NO: 14089 - DNA, 21 bp, synthetic construct
  misc_feature 1..21: note = Synthetic
  source 1..21: mol_type = other DNA
gtccacttggccatcgcacct

SEQ ID NO: 14090 - DNA, 21 bp, synthetic construct
  misc_feature 1..21: note = Synthetic
  source 1..21: mol_type = other DNA
gtccagagcgaccacgttcct

SEQ ID NO: 14091 - DNA, 21 bp, synthetic construct
  misc_feature 1..21: note = Synthetic
  source 1..21: mol_type = other DNA
gtccagcgcaatttccagccc

SEQ ID NO: 14092 - DNA, 21 bp, synthetic construct
  misc_feature 1..21: note = Synthetic
  source 1..21: mol_type = other DNA
gtccagcgtcatcttcctgac

SEQ ID NO: 14093 - DNA, 21 bp, synthetic construct
  misc_feature 1..21: note = Synthetic
  source 1..21: mol_type = other DNA
gtccagctggaagccttcctc

SEQ ID NO: 14094 - DNA, 21 bp, synthetic construct
  misc_feature 1..21: note = Synthetic
  source 1..21: mol_type = other DNA
gtccagggtgatgcattcgcc

SEQ ID NO: 14095 - DNA, 21 bp, synthetic construct
  misc_feature 1..21: note = Synthetic
  source 1..21: mol_type = other DNA
gtccagtacatgaagccatga

SEQ ID NO: 14096 - DNA, 21 bp, synthetic construct
  misc_feature 1..21: note = Synthetic
  source 1..21: mol_type = other DNA
gtccagtagatgttgctgtgg

SEQ ID NO: 14097 - DNA, 21 bp, synthetic construct
  misc_feature 1..21: note = Synthetic
  source 1..21: mol_type = other DNA
gtccagttcgtgcaaataatc

SEQ ID NO: 14098 - DNA, 21 bp, synthetic construct
  misc_feature 1..21: note = Synthetic
  source 1..21: mol_type = other DNA
gtccccccgggcctgtttctc

SEQ ID NO: 14099 - DNA, 21 bp, synthetic construct
  misc_feature 1..21: note = Synthetic
  source 1..21: mol_type = other DNA
gtccccgccgcggcgaggagc

SEQ ID NO: 14100 - DNA, 21 bp, synthetic construct
  misc_feature 1..21: note = Synthetic
  source 1..21: mol_type = other DNA
gtccccggatttgcaggtgac

SEQ ID NO: 14101 - DNA, 21 bp, synthetic construct
  misc_feature 1..21: note = Synthetic
  source 1..21: mol_type = other DNA
gtccccggcattcattgacac

SEQ ID NO: 14102 - DNA, 21 bp, synthetic construct
  misc_feature 1..21: note = Synthetic
  source 1..21: mol_type = other DNA
gtccccttggaacacgtaaag

SEQ ID NO: 14103 - DNA, 21 bp, synthetic construct
  misc_feature 1..21: note = Synthetic
  source 1..21: mol_type = other DNA
gtcccgacccggatcacgacc

SEQ ID NO: 14104 - DNA, 21 bp, synthetic construct
  misc_feature 1..21: note = Synthetic
  source 1..21: mol_type = other DNA
gtcccgcactctttgatgggt

SEQ ID NO: 14105 - DNA, 21 bp, synthetic construct
  misc_feature 1..21: note = Synthetic
  source 1..21: mol_type = other DNA
gtcccggcagtctctagccat

SEQ ID NO: 14106 - DNA, 21 bp, synthetic construct
  misc_feature 1..21: note = Synthetic
  source 1..21: mol_type = other DNA
gtcccggtcaacctgcccctc

SEQ ID NO: 14107 - DNA, 21 bp, synthetic construct
  misc_feature 1..21: note = Synthetic
  source 1..21: mol_type = other DNA
gtcccggtctgagtcacagac

SEQ ID NO: 14108 - DNA, 21 bp, synthetic construct
  misc_feature 1..21: note = Synthetic
  source 1..21: mol_type = other DNA
gtcccgtcaaacgatccagac

SEQ ID NO: 14109 - DNA, 21 bp, synthetic construct
  misc_feature 1..21: note = Synthetic
  source 1..21: mol_type = other DNA
gtcccgttggtgccatctgct

SEQ ID NO: 14110 - DNA, 21 bp, synthetic construct
  misc_feature 1..21: note = Synthetic
  source 1..21: mol_type = other DNA
gtccctcgcagagtgtcacat

SEQ ID NO: 14111 - DNA, 21 bp, synthetic construct
  misc_feature 1..21: note = Synthetic
  source 1..21: mol_type = other DNA
gtccctcgcagagtgtcagac

SEQ ID NO: 14112 - DNA, 21 bp, synthetic construct
  misc_feature 1..21: note = Synthetic
  source 1..21: mol_type = other DNA
gtccctggccagcagcatgcc

SEQ ID NO: 14113 - DNA, 21 bp, synthetic construct
  misc_feature 1..21: note = Synthetic
  source 1..21: mol_type = other DNA
gtccctggggacaattgccaa

SEQ ID NO: 14114 - DNA, 21 bp, synthetic construct
  misc_feature 1..21: note = Synthetic
  source 1..21: mol_type = other DNA
gtccgaagcctgttctgcctc

SEQ ID NO: 14115 - DNA, 21 bp, synthetic construct
  misc_feature 1..21: note = Synthetic
  source 1..21: mol_type = other DNA
gtccgggcaggcgcaggtaaa

SEQ ID NO: 14116 - DNA, 21 bp, synthetic construct
  misc_feature 1..21: note = Synthetic
  source 1..21: mol_type = other DNA
gtcctagctggaaaccctggc

SEQ ID NO: 14117 - DNA, 21 bp, synthetic construct
  misc_feature 1..21: note = Synthetic
  source 1..21: mol_type = other DNA
gtcctcaaagacggccaagga

SEQ ID NO: 14118 - DNA, 21 bp, synthetic construct
  misc_feature 1..21: note = Synthetic
  source 1..21: mol_type = other DNA
gtcctcacggccaaggtaacc

SEQ ID NO: 14119 - DNA, 21 bp, synthetic construct
  misc_feature 1..21: note = Synthetic
  source 1..21: mol_type = other DNA
gtcctctcacaccagttcact

SEQ ID NO: 14120 - DNA, 21 bp, synthetic construct
  misc_feature 1..21: note = Synthetic
  source 1..21: mol_type = other DNA
gtcctgacagccacacctggg

SEQ ID NO: 14121 - DNA, 21 bp, synthetic construct
  misc_feature 1..21: note = Synthetic
  source 1..21: mol_type = other DNA
gtcctgggagcacgtcttggg

SEQ ID NO: 14122 - DNA, 21 bp, synthetic construct
  misc_feature 1..21: note = Synthetic
  source 1..21: mol_type = other DNA
gtcctggttgtggcaaatgtg

SEQ ID NO: 14123 - DNA, 21 bp, synthetic construct
  misc_feature 1..21: note = Synthetic
  source 1..21: mol_type = other DNA
gtccttacggctgtggagctg

SEQ ID NO: 14124 - DNA, 21 bp, synthetic construct
  misc_feature 1..21: note = Synthetic
  source 1..21: mol_type = other DNA
gtccttgcagtcatattcccg

SEQ ID NO: 14125 - DNA, 21 bp, synthetic construct
  misc_feature 1..21: note = Synthetic
  source 1..21: mol_type = other DNA
gtccttgcagtcggggccacc

SEQ ID NO: 14126 - DNA, 21 bp, synthetic construct
  misc_feature 1..21: note = Synthetic
  source 1..21: mol_type = other DNA
gtcgcaggcccacagctgggg

SEQ ID NO: 14127 - DNA, 21 bp, synthetic construct
  misc_feature 1..21: note = Synthetic
  source 1..21: mol_type = other DNA
gtcgcagtccacttggccatc

SEQ ID NO: 14128 - DNA, 21 bp, synthetic construct
  misc_feature 1..21: note = Synthetic
  source 1..21: mol_type = other DNA
gtcgccacagagcacagcgga

SEQ ID NO: 14129 - DNA, 21 bp, synthetic construct
  misc_feature 1..21: note = Synthetic
  source 1..21: mol_type = other DNA
gtcgcccacgtggctgaagat

SEQ ID NO: 14130 - DNA, 21 bp, synthetic construct
  misc_feature 1..21: note = Synthetic
  source 1..21: mol_type = other DNA
gtcgcccactgcagtccccgc

SEQ ID NO: 14131 - DNA, 21 bp, synthetic construct
  misc_feature 1..21: note = Synthetic
  source 1..21: mol_type = other DNA
gtcgcccagagcttggtgaga

SEQ ID NO: 14132 - DNA, 21 bp, synthetic construct
  misc_feature 1..21: note = Synthetic
  source 1..21: mol_type = other DNA
gtcgcccaggccagactgcgg

SEQ ID NO: 14133 - DNA, 21 bp, synthetic construct
  misc_feature 1..21: note = Synthetic
  source 1..21: mol_type = other DNA
gtcgcctttgtgacaggaacc

SEQ ID NO: 14134 - DNA, 21 bp, synthetic construct
  misc_feature 1..21: note = Synthetic
  source 1..21: mol_type = other DNA
gtcgcggaggcggctccgggg

SEQ ID NO: 14135 - DNA, 21 bp, synthetic construct
  misc_feature 1..21: note = Synthetic
  source 1..21: mol_type = other DNA
gtcgggaacaggtcgggtggt

SEQ ID NO: 14136 - DNA, 21 bp, synthetic construct
  misc_feature 1..21: note = Synthetic
  source 1..21: mol_type = other DNA
gtcgggaggatgggcaccagg

SEQ ID NO: 14137 - DNA, 21 bp, synthetic construct
  misc_feature 1..21: note = Synthetic
  source 1..21: mol_type = other DNA
gtcgggatcctgacactcatc

SEQ ID NO: 14138 - DNA, 21 bp, synthetic construct
  misc_feature 1..21: note = Synthetic
  source 1..21: mol_type = other DNA
gtcggggcacaggcactcgta

SEQ ID NO: 14139 - DNA, 21 bp, synthetic construct
  misc_feature 1..21: note = Synthetic
  source 1..21: mol_type = other DNA
gtcggggccaccatcacagcg

SEQ ID NO: 14140 - DNA, 21 bp, synthetic construct
  misc_feature 1..21: note = Synthetic
  source 1..21: mol_type = other DNA
gtcgggggcctggatgtctct

SEQ ID NO: 14141 - DNA, 21 bp, synthetic construct
  misc_feature 1..21: note = Synthetic
  source 1..21: mol_type = other DNA
gtcggggtcgttgtcgcaggc

SEQ ID NO: 14142 - DNA, 21 bp, synthetic construct
  misc_feature 1..21: note = Synthetic
  source 1..21: mol_type = other DNA
gtcgggtggttgtgtgctgtg

SEQ ID NO: 14143 - DNA, 21 bp, synthetic construct
  misc_feature 1..21: note = Synthetic
  source 1..21: mol_type = other DNA
gtcggtccagtagatgttgct

SEQ ID NO: 14144 - DNA, 21 bp, synthetic construct
  misc_feature 1..21: note = Synthetic
  source 1..21: mol_type = other DNA
gtcgtcgcctttgtgacagga

SEQ ID NO: 14145 - DNA, 21 bp, synthetic construct
  misc_feature 1..21: note = Synthetic
  source 1..21: mol_type = other DNA
gtcgttgtcgcaggcccacag

SEQ ID NO: 14146 - DNA, 21 bp, synthetic construct
  misc_feature 1..21: note = Synthetic
  source 1..21: mol_type = other DNA
gtctagcaaggcttgcataga

SEQ ID NO: 14147 - DNA, 21 bp, synthetic construct
  misc_feature 1..21: note = Synthetic
  source 1..21: mol_type = other DNA
gtctcaggaagggttctgggc

SEQ ID NO: 14148 - DNA, 21 bp, synthetic construct
  misc_feature 1..21: note = Synthetic
  source 1..21: mol_type = other DNA
gtctcaggcacttaataaata

SEQ ID NO: 14149 - DNA, 21 bp, synthetic construct
  misc_feature 1..21: note = Synthetic
  source 1..21: mol_type = other DNA
gtctccaactcctgaactcaa

SEQ ID NO: 14150 - DNA, 21 bp, synthetic construct
  misc_feature 1..21: note = Synthetic
  source 1..21: mol_type = other DNA
gtctcctgggactcatcagag

SEQ ID NO: 14151 - DNA, 21 bp, synthetic construct
  misc_feature 1..21: note = Synthetic
  source 1..21: mol_type = other DNA
gtctcctgggtggccactgca

SEQ ID NO: 14152 - DNA, 21 bp, synthetic construct
  misc_feature 1..21: note = Synthetic
  source 1..21: mol_type = other DNA
gtctcgaggggtagctgtagc

SEQ ID NO: 14153 - DNA, 21 bp, synthetic construct
  misc_feature 1..21: note = Synthetic
  source 1..21: mol_type = other DNA
gtctcgatctcctgacctcat

SEQ ID NO: 14154 - DNA, 21 bp, synthetic construct
  misc_feature 1..21: note = Synthetic
  source 1..21: mol_type = other DNA
gtctcgctctgtcgcccaggc

SEQ ID NO: 14155 - DNA, 21 bp, synthetic construct
  misc_feature 1..21: note = Synthetic
  source 1..21: mol_type = other DNA
gtctcggtgccaccacggatt

SEQ ID NO: 14156 - DNA, 21 bp, synthetic construct
  misc_feature 1..21: note = Synthetic
  source 1..21: mol_type = other DNA
gtctctagccatgttgcagac

SEQ ID NO: 14157 - DNA, 21 bp, synthetic construct
  misc_feature 1..21: note = Synthetic
  source 1..21: mol_type = other DNA
gtctctccggacatcagtgca

SEQ ID NO: 14158 - DNA, 21 bp, synthetic construct
  misc_feature 1..21: note = Synthetic
  source 1..21: mol_type = other DNA
gtctctgctgatgacggtgtc

SEQ ID NO: 14159 - DNA, 21 bp, synthetic construct
  misc_feature 1..21: note = Synthetic
  source 1..21: mol_type = other DNA
gtctgacggaggctgtcactg

SEQ ID NO: 14160 - DNA, 21 bp, synthetic construct
  misc_feature 1..21: note = Synthetic
  source 1..21: mol_type = other DNA
gtctgagccgtccaagcagtc

SEQ ID NO: 14161 - DNA, 21 bp, synthetic construct
  misc_feature 1..21: note = Synthetic
  source 1..21: mol_type = other DNA
gtctgagccgttgtcgcagtc

SEQ ID NO: 14162 - DNA, 21 bp, synthetic construct
  misc_feature 1..21: note = Synthetic
  source 1..21: mol_type = other DNA
gtctgagtcacagacgaactg

SEQ ID NO: 14163 - DNA, 21 bp, synthetic construct
  misc_feature 1..21: note = Synthetic
  source 1..21: mol_type = other DNA
gtctggccaaattcatttttt

SEQ ID NO: 14164 - DNA, 21 bp, synthetic construct
  misc_feature 1..21: note = Synthetic
  source 1..21: mol_type = other DNA
gtcttactatgttgcccaggc

SEQ ID NO: 14165 - DNA, 21 bp, synthetic construct
  misc_feature 1..21: note = Synthetic
  source 1..21: mol_type = other DNA
gtcttcatctgttgcccaggc

SEQ ID NO: 14166 - DNA, 21 bp, synthetic construct
  misc_feature 1..21: note = Synthetic
  source 1..21: mol_type = other DNA
gtcttccggttgcccccgttg

SEQ ID NO: 14167 - DNA, 21 bp, synthetic construct
  misc_feature 1..21: note = Synthetic
  source 1..21: mol_type = other DNA
gtcttctctgtctttgaataa

SEQ ID NO: 14168 - DNA, 21 bp, synthetic construct
  misc_feature 1..21: note = Synthetic
  source 1..21: mol_type = other DNA
gtcttctgatagacggggttg

SEQ ID NO: 14169 - DNA, 21 bp, synthetic construct
  misc_feature 1..21: note = Synthetic
  source 1..21: mol_type = other DNA
gtcttggcactggaactcgtt

SEQ ID NO: 14170 - DNA, 21 bp, synthetic construct
  misc_feature 1..21: note = Synthetic
  source 1..21: mol_type = other DNA
gtcttgggggagcacgtctcc

SEQ ID NO: 14171 - DNA, 21 bp, synthetic construct
  misc_feature 1..21: note = Synthetic
  source 1..21: mol_type = other DNA
gtcttggggggacagccttgc

SEQ ID NO: 14172 - DNA, 21 bp, synthetic construct
  misc_feature 1..21: note = Synthetic
  source 1..21: mol_type = other DNA
gtctttgaataaaacaaggcc

SEQ ID NO: 14173 - DNA, 21 bp, synthetic construct
  misc_feature 1..21: note = Synthetic
  source 1..21: mol_type = other DNA
gtgaacttgatcggggctggt

SEQ ID NO: 14174 - DNA, 21 bp, synthetic construct
  misc_feature 1..21: note = Synthetic
  source 1..21: mol_type = other DNA
gtgaagaagaggtaggcgatg

SEQ ID NO: 14175 - DNA, 21 bp, synthetic construct
  misc_feature 1..21: note = Synthetic
  source 1..21: mol_type = other DNA
gtgaagtttggagtcaaccca

SEQ ID NO: 14176 - DNA, 21 bp, synthetic construct
  misc_feature 1..21: note = Synthetic
  source 1..21: mol_type = other DNA
gtgaatgagtttggtctcggt

SEQ ID NO: 14177 - DNA, 21 bp, synthetic construct
  misc_feature 1..21: note = Synthetic
  source 1..21: mol_type = other DNA
gtgaatggcttggaggcattt

SEQ ID NO: 14178 - DNA, 21 bp, synthetic construct
  misc_feature 1..21: note = Synthetic
  source 1..21: mol_type = other DNA
gtgacacccatctcccagaag

SEQ ID NO: 14179 - DNA, 21 bp, synthetic construct
  misc_feature 1..21: note = Synthetic
  source 1..21: mol_type = other DNA
gtgacacttgaacttgttggg

SEQ ID NO: 14180 - DNA, 21 bp, synthetic construct
  misc_feature 1..21: note = Synthetic
  source 1..21: mol_type = other DNA
gtgacagacaagcacgtctcc

SEQ ID NO: 14181 - DNA, 21 bp, synthetic construct
  misc_feature 1..21: note = Synthetic
  source 1..21: mol_type = other DNA
gtgacaggaaccgcggaggaa

SEQ ID NO: 14182 - DNA, 21 bp, synthetic construct
  misc_feature 1..21: note = Synthetic
  source 1..21: mol_type = other DNA
gtgacagggcaaaggctaacc

SEQ ID NO: 14183 - DNA, 21 bp, synthetic construct
  misc_feature 1..21: note = Synthetic
  source 1..21: mol_type = other DNA
gtgacatcttcacgcgggagt

SEQ ID NO: 14184 - DNA, 21 bp, synthetic construct
  misc_feature 1..21: note = Synthetic
  source 1..21: mol_type = other DNA
gtgaccagtgactcaggctct

SEQ ID NO: 14185 - DNA, 21 bp, synthetic construct
  misc_feature 1..21: note = Synthetic
  source 1..21: mol_type = other DNA
gtgactcaggctctgcctctg

SEQ ID NO: 14186 - DNA, 21 bp, synthetic construct
  misc_feature 1..21: note = Synthetic
  source 1..21: mol_type = other DNA
gtgagacattgtcactatctc

SEQ ID NO: 14187 - DNA, 21 bp, synthetic construct
  misc_feature 1..21: note = Synthetic
  source 1..21: mol_type = other DNA
gtgagcaccgggcaggaggcc

SEQ ID NO: 14188 - DNA, 21 bp, synthetic construct
  misc_feature 1..21: note = Synthetic
  source 1..21: mol_type = other DNA
gtgagccactgcgcccggcct

SEQ ID NO: 14189 - DNA, 21 bp, synthetic construct
  misc_feature 1..21: note = Synthetic
  source 1..21: mol_type = other DNA
gtgagcccaggggtggcccca

SEQ ID NO: 14190 - DNA, 21 bp, synthetic construct
  misc_feature 1..21: note = Synthetic
  source 1..21: mol_type = other DNA
gtgaggcacctgtgtctggcc

SEQ ID NO: 14191 - DNA, 21 bp, synthetic construct
  misc_feature 1..21: note = Synthetic
  source 1..21: mol_type = other DNA
gtgaggcagctcctcatgtcc

SEQ ID NO: 14192 - DNA, 21 bp, synthetic construct
  misc_feature 1..21: note = Synthetic
  source 1..21: mol_type = other DNA
gtgaggcggttggcactgaaa

SEQ ID NO: 14193 - DNA, 21 bp, synthetic construct
  misc_feature 1..21: note = Synthetic
  source 1..21: mol_type = other DNA
gtgaggttgtggaagagaacc

SEQ ID NO: 14194 - DNA, 21 bp, synthetic construct
  misc_feature 1..21: note = Synthetic
  source 1..21: mol_type = other DNA
gtgataacagtttcaaccaat

SEQ ID NO: 14195 - DNA, 21 bp, synthetic construct
  misc_feature 1..21: note = Synthetic
  source 1..21: mol_type = other DNA
gtgatccagctcagcctccca

SEQ ID NO: 14196 - DNA, 21 bp, synthetic construct
  misc_feature 1..21: note = Synthetic
  source 1..21: mol_type = other DNA
gtgatgcattcgccgctgtga

SEQ ID NO: 14197 - DNA, 21 bp, synthetic construct
  misc_feature 1..21: note = Synthetic
  source 1..21: mol_type = other DNA
gtgatgccattgggccactga

SEQ ID NO: 14198 - DNA, 21 bp, synthetic construct
  misc_feature 1..21: note = Synthetic
  source 1..21: mol_type = other DNA
gtgcaaaataataacacaaat

SEQ ID NO: 14199 - DNA, 21 bp, synthetic construct
  misc_feature 1..21: note = Synthetic
  source 1..21: mol_type = other DNA
gtgcaaacataacaaaaaatc

SEQ ID NO: 14200 - DNA, 21 bp, synthetic construct
  misc_feature 1..21: note = Synthetic
  source 1..21: mol_type = other DNA
gtgcaaataatctttgtacat

SEQ ID NO: 14201 - DNA, 21 bp, synthetic construct
  misc_feature 1..21: note = Synthetic
  source 1..21: mol_type = other DNA
gtgcaacagtaacacggcgat

SEQ ID NO: 14202 - DNA, 21 bp, synthetic construct
  misc_feature 1..21: note = Synthetic
  source 1..21: mol_type = other DNA
gtgcaaggagaccacgggaat

SEQ ID NO: 14203 - DNA, 21 bp, synthetic construct
  misc_feature 1..21: note = Synthetic
  source 1..21: mol_type = other DNA
gtgcaggccacgtgtcctcac

SEQ ID NO: 14204 - DNA, 21 bp, synthetic construct
  misc_feature 1..21: note = Synthetic
  source 1..21: mol_type = other DNA
gtgcagtggctcgatcatggc

SEQ ID NO: 14205 - DNA, 21 bp, synthetic construct
  misc_feature 1..21: note = Synthetic
  source 1..21: mol_type = other DNA
gtgcatgttttaaacacatac

SEQ ID NO: 14206 - DNA, 21 bp, synthetic construct
  misc_feature 1..21: note = Synthetic
  source 1..21: mol_type = other DNA
gtgccaccacggattcagcca

SEQ ID NO: 14207 - DNA, 21 bp, synthetic construct
  misc_feature 1..21: note = Synthetic
  source 1..21: mol_type = other DNA
gtgccaccgtacccagctgat

SEQ ID NO: 14208 - DNA, 21 bp, synthetic construct
  misc_feature 1..21: note = Synthetic
  source 1..21: mol_type = other DNA
gtgccatctgctgttgtgtgt

SEQ ID NO: 14209 - DNA, 21 bp, synthetic construct
  misc_feature 1..21: note = Synthetic
  source 1..21: mol_type = other DNA
gtgcccaggacagagtcggtc

SEQ ID NO: 14210 - DNA, 21 bp, synthetic construct
  misc_feature 1..21: note = Synthetic
  source 1..21: mol_type = other DNA
gtgcccgccaccacgcccggc

SEQ ID NO: 14211 - DNA, 21 bp, synthetic construct
  misc_feature 1..21: note = Synthetic
  source 1..21: mol_type = other DNA
gtgccggttggtgaagaagag

SEQ ID NO: 14212 - DNA, 21 bp, synthetic construct
  misc_feature 1..21: note = Synthetic
  source 1..21: mol_type = other DNA
gtgctccgaaaccagaaaggc

SEQ ID NO: 14213 - DNA, 21 bp, synthetic construct
  misc_feature 1..21: note = Synthetic
  source 1..21: mol_type = other DNA
gtgctgcagatcattctctgg

SEQ ID NO: 14214 - DNA, 21 bp, synthetic construct
  misc_feature 1..21: note = Synthetic
  source 1..21: mol_type = other DNA
gtgctgggattacaggcgtga

SEQ ID NO: 14215 - DNA, 21 bp, synthetic construct
  misc_feature 1..21: note = Synthetic
  source 1..21: mol_type = other DNA
gtgctgtgtccttacggctgt

SEQ ID NO: 14216 - DNA, 21 bp, synthetic construct
  misc_feature 1..21: note = Synthetic
  source 1..21: mol_type = other DNA
gtggaactcgaaggccgagca

SEQ ID NO: 14217 - DNA, 21 bp, synthetic construct
  misc_feature 1..21: note = Synthetic
  source 1..21: mol_type = other DNA
gtggaagagaaccatatcctc

SEQ ID NO: 14218 - DNA, 21 bp, synthetic construct
  misc_feature 1..21: note = Synthetic
  source 1..21: mol_type = other DNA
gtggaagcactaggtgggcgg

SEQ ID NO: 14219 - DNA, 21 bp, synthetic construct
  misc_feature 1..21: note = Synthetic
  source 1..21: mol_type = other DNA
gtggacctcatcctctgtggt

SEQ ID NO: 14220 - DNA, 21 bp, synthetic construct
  misc_feature 1..21: note = Synthetic
  source 1..21: mol_type = other DNA
gtggagagaaactcaaaactt

SEQ ID NO: 14221 - DNA, 21 bp, synthetic construct
  misc_feature 1..21: note = Synthetic
  source 1..21: mol_type = other DNA
gtggagctgacctttagcctg

SEQ ID NO: 14222 - DNA, 21 bp, synthetic construct
  misc_feature 1..21: note = Synthetic
  source 1..21: mol_type = other DNA
gtggagctgttgcactggaag

SEQ ID NO: 14223 - DNA, 21 bp, synthetic construct
  misc_feature 1..21: note = Synthetic
  source 1..21: mol_type = other DNA
gtggatccagtccacagccag

SEQ ID NO: 14224 - DNA, 21 bp, synthetic construct
  misc_feature 1..21: note = Synthetic
  source 1..21: mol_type = other DNA
gtggatgaggcagggccaggg

SEQ ID NO: 14225 - DNA, 21 bp, synthetic construct
  misc_feature 1..21: note = Synthetic
  source 1..21: mol_type = other DNA
gtggatgcactcgccacttag

SEQ ID NO: 14226 - DNA, 21 bp, synthetic construct
  misc_feature 1..21: note = Synthetic
  source 1..21: mol_type = other DNA
gtggatgtctcctgggtggcc

SEQ ID NO: 14227 - DNA, 21 bp, synthetic construct
  misc_feature 1..21: note = Synthetic
  source 1..21: mol_type = other DNA
gtggcaaatgtggacctcatc

SEQ ID NO: 14228 - DNA, 21 bp, synthetic construct
  misc_feature 1..21: note = Synthetic
  source 1..21: mol_type = other DNA
gtggcagcgaaactcgtcctg

SEQ ID NO: 14229 - DNA, 21 bp, synthetic construct
  misc_feature 1..21: note = Synthetic
  source 1..21: mol_type = other DNA
gtggcataatcatagctcacg

SEQ ID NO: 14230 - DNA, 21 bp, synthetic construct
  misc_feature 1..21: note = Synthetic
  source 1..21: mol_type = other DNA
gtggcatcatttggtgaatga

SEQ ID NO: 14231 - DNA, 21 bp, synthetic construct
  misc_feature 1..21: note = Synthetic
  source 1..21: mol_type = other DNA
gtggccacagcgcagttttcc

SEQ ID NO: 14232 - DNA, 21 bp, synthetic construct
  misc_feature 1..21: note = Synthetic
  source 1..21: mol_type = other DNA
gtggccacaggacagccttgc

SEQ ID NO: 14233 - DNA, 21 bp, synthetic construct
  misc_feature 1..21: note = Synthetic
  source 1..21: mol_type = other DNA
gtggccactgcagcctcagcc

SEQ ID NO: 14234 - DNA, 21 bp, synthetic construct
  misc_feature 1..21: note = Synthetic
  source 1..21: mol_type = other DNA
gtggccccaggcagccgggag

SEQ ID NO: 14235 - DNA, 21 bp, synthetic construct
  misc_feature 1..21: note = Synthetic
  source 1..21: mol_type = other DNA
gtggccgggggcccctctgtg

SEQ ID NO: 14236 - DNA, 21 bp, synthetic construct
  misc_feature 1..21: note = Synthetic
  source 1..21: mol_type = other DNA
gtggcgatggggaggacaatg

SEQ ID NO: 14237 - DNA, 21 bp, synthetic construct
  misc_feature 1..21: note = Synthetic
  source 1..21: mol_type = other DNA
gtggcgcaatctcggctcact

SEQ ID NO: 14238 - DNA, 21 bp, synthetic construct
  misc_feature 1..21: note = Synthetic
  source 1..21: mol_type = other DNA
gtggctcgatcatggctcact

SEQ ID NO: 14239 - DNA, 21 bp, synthetic construct
  misc_feature 1..21: note = Synthetic
  source 1..21: mol_type = other DNA
gtggctgaagatctcggctgc

SEQ ID NO: 14240 - DNA, 21 bp, synthetic construct
  misc_feature 1..21: note = Synthetic
  source 1..21: mol_type = other DNA
gtgggaacagccgccgttgtt

SEQ ID NO: 14241 - DNA, 21 bp, synthetic construct
  misc_feature 1..21: note = Synthetic
  source 1..21: mol_type = other DNA
gtgggccagcctcttttcatc

SEQ ID NO: 14242 - DNA, 21 bp, synthetic construct
  misc_feature 1..21: note = Synthetic
  source 1..21: mol_type = other DNA
gtgggcggacataaagacgac

SEQ ID NO: 14243 - DNA, 21 bp, synthetic construct
  misc_feature 1..21: note = Synthetic
  source 1..21: mol_type = other DNA
gtgggctctgtcaagctgggt

SEQ ID NO: 14244 - DNA, 21 bp, synthetic construct
  misc_feature 1..21: note = Synthetic
  source 1..21: mol_type = other DNA
gtggggacggaggtgtcgcca

SEQ ID NO: 14245 - DNA, 21 bp, synthetic construct
  misc_feature 1..21: note = Synthetic
  source 1..21: mol_type = other DNA
gtggggcgagggcgcccccca

SEQ ID NO: 14246 - DNA, 21 bp, synthetic construct
  misc_feature 1..21: note = Synthetic
  source 1..21: mol_type = other DNA
gtgggggtccagctggaagcc

SEQ ID NO: 14247 - DNA, 21 bp, synthetic construct
  misc_feature 1..21: note = Synthetic
  source 1..21: mol_type = other DNA
gtgggggttgatctgcggggc

SEQ ID NO: 14248 - DNA, 21 bp, synthetic construct
  misc_feature 1..21: note = Synthetic
  source 1..21: mol_type = other DNA
gtgggtaggggtcgggaggat

SEQ ID NO: 14249 - DNA, 21 bp, synthetic construct
  misc_feature 1..21: note = Synthetic
  source 1..21: mol_type = other DNA
gtgggtcatgattcgggggtg

SEQ ID NO: 14250 - DNA, 21 bp, synthetic construct
  misc_feature 1..21: note = Synthetic
  source 1..21: mol_type = other DNA
gtggtcctctcacaccagttc

SEQ ID NO: 14251 - DNA, 21 bp, synthetic construct
  misc_feature 1..21: note = Synthetic
  source 1..21: mol_type = other DNA
gtggtcttctgatagacgggg

SEQ ID NO: 14252 - DNA, 21 bp, synthetic construct
  misc_feature 1..21: note = Synthetic
  source 1..21: mol_type = other DNA
gtggtgagcccaggggtggcc

SEQ ID NO: 14253 - DNA, 21 bp, synthetic construct
  misc_feature 1..21: note = Synthetic
  source 1..21: mol_type = other DNA
gtggttgtgtgctgtgtcctt

SEQ ID NO: 14254 - DNA, 21 bp, synthetic construct
  misc_feature 1..21: note = Synthetic
  source 1..21: mol_type = other DNA
gtggtttaaaaagtgacaccc

SEQ ID NO: 14255 - DNA, 21 bp, synthetic construct
  misc_feature 1..21: note = Synthetic
  source 1..21: mol_type = other DNA
gtgtacaactctgaactgaga

SEQ ID NO: 14256 - DNA, 21 bp, synthetic construct
  misc_feature 1..21: note = Synthetic
  source 1..21: mol_type = other DNA
gtgtactcgctccggtccagc

SEQ ID NO: 14257 - DNA, 21 bp, synthetic construct
  misc_feature 1..21: note = Synthetic
  source 1..21: mol_type = other DNA
gtgtatatatatatatataag

SEQ ID NO: 14258 - DNA, 21 bp, synthetic construct
  misc_feature 1..21: note = Synthetic
  source 1..21: mol_type = other DNA
gtgtatgtcgcggaggcggct

SEQ ID NO: 14259 - DNA, 21 bp, synthetic construct
  misc_feature 1..21: note = Synthetic
  source 1..21: mol_type = other DNA
gtgtcacattaacgcagccaa

SEQ ID NO: 14260 - DNA, 21 bp, synthetic construct
  misc_feature 1..21: note = Synthetic
  source 1..21: mol_type = other DNA
gtgtcacggtggagagaaact

SEQ ID NO: 14261 - DNA, 21 bp, synthetic construct
  misc_feature 1..21: note = Synthetic
  source 1..21: mol_type = other DNA
gtgtcagacagccttgctcgt

SEQ ID NO: 14262 - DNA, 21 bp, synthetic construct
  misc_feature 1..21: note = Synthetic
  source 1..21: mol_type = other DNA
gtgtcataggaagagacgccg

SEQ ID NO: 14263 - DNA, 21 bp, synthetic construct
  misc_feature 1..21: note = Synthetic
  source 1..21: mol_type = other DNA
gtgtcatcctggtccccccgg

SEQ ID NO: 14264 - DNA, 21 bp, synthetic construct
  misc_feature 1..21: note = Synthetic
  source 1..21: mol_type = other DNA
gtgtccagagcgaccacgttc

SEQ ID NO: 14265 - DNA, 21 bp, synthetic construct
  misc_feature 1..21: note = Synthetic
  source 1..21: mol_type = other DNA
gtgtcccgacccggatcacga

SEQ ID NO: 14266 - DNA, 21 bp, synthetic construct
  misc_feature 1..21: note = Synthetic
  source 1..21: mol_type = other DNA
gtgtcctagctggaaaccctg

SEQ ID NO: 14267 - DNA, 21 bp, synthetic construct
  misc_feature 1..21: note = Synthetic
  source 1..21: mol_type = other DNA
gtgtcctcacggccaaggtaa

SEQ ID NO: 14268 - DNA, 21 bp, synthetic construct
  misc_feature 1..21: note = Synthetic
  source 1..21: mol_type = other DNA
gtgtcctgacagccacacctg

SEQ ID NO: 14269 - DNA, 21 bp, synthetic construct
  misc_feature 1..21: note = Synthetic
  source 1..21: mol_type = other DNA
gtgtccttacggctgtggagc

SEQ ID NO: 14270 - DNA, 21 bp, synthetic construct
  misc_feature 1..21: note = Synthetic
  source 1..21: mol_type = other DNA
gtgtcgccacagagcacagcg

SEQ ID NO: 14271 - DNA, 21 bp, synthetic construct
  misc_feature 1..21: note = Synthetic
  source 1..21: mol_type = other DNA
gtgtcgggaacaggtcgggtg

SEQ ID NO: 14272 - DNA, 21 bp, synthetic construct
  misc_feature 1..21: note = Synthetic
  source 1..21: mol_type = other DNA
gtgtcgggatcctgacactca

SEQ ID NO: 14273 - DNA, 21 bp, synthetic construct
  misc_feature 1..21: note = Synthetic
  source 1..21: mol_type = other DNA
gtgtctcaggcacttaataaa

SEQ ID NO: 14274 - DNA, 21 bp, synthetic construct
  misc_feature 1..21: note = Synthetic
  source 1..21: mol_type = other DNA
gtgtctggccaaattcatttt

SEQ ID NO: 14275 - DNA, 21 bp, synthetic construct
  misc_feature 1..21: note = Synthetic
  source 1..21: mol_type = other DNA
gtgtgctgtgtccttacggct

SEQ ID NO: 14276 - DNA, 21 bp, synthetic construct
  misc_feature 1..21: note = Synthetic
  source 1..21: mol_type = other DNA
gtgtgggggtccagctggaag

SEQ ID NO: 14277 - DNA, 21 bp, synthetic construct
  misc_feature 1..21: note = Synthetic
  source 1..21: mol_type = other DNA
gtgtgtatatatatatatata

SEQ ID NO: 14278 - DNA, 21 bp, synthetic construct
  misc_feature 1..21: note = Synthetic
  source 1..21: mol_type = other DNA
gtgtgttgaaagccacttgct

SEQ ID NO: 14279 - DNA, 21 bp, synthetic construct
  misc_feature 1..21: note = Synthetic
  source 1..21: mol_type = other DNA
gtgttagccaggatggtctcg

SEQ ID NO: 14280 - DNA, 21 bp, synthetic construct
  misc_feature 1..21: note = Synthetic
  source 1..21: mol_type = other DNA
gtgttgaaagccacttgcttc

SEQ ID NO: 14281 - DNA, 21 bp, synthetic construct
  misc_feature 1..21: note = Synthetic
  source 1..21: mol_type = other DNA
gtgttttgtccctggggacaa

SEQ ID NO: 14282 - DNA, 21 bp, synthetic construct
  misc_feature 1..21: note = Synthetic
  source 1..21: mol_type = other DNA
gttagccaggatggtctcgat

SEQ ID NO: 14283 - DNA, 21 bp, synthetic construct
  misc_feature 1..21: note = Synthetic
  source 1..21: mol_type = other DNA
gttcacaccattctcctgcct

SEQ ID NO: 14284 - DNA, 21 bp, synthetic construct
  misc_feature 1..21: note = Synthetic
  source 1..21: mol_type = other DNA
gttcacgcagagctggctgca

SEQ ID NO: 14285 - DNA, 21 bp, synthetic construct
  misc_feature 1..21: note = Synthetic
  source 1..21: mol_type = other DNA
gttcacgccacgtcatcctcc

SEQ ID NO: 14286 - DNA, 21 bp, synthetic construct
  misc_feature 1..21: note = Synthetic
  source 1..21: mol_type = other DNA
gttcactcctcttggctgggt

SEQ ID NO: 14287 - DNA, 21 bp, synthetic construct
  misc_feature 1..21: note = Synthetic
  source 1..21: mol_type = other DNA
gttcatctgaccagtcccggc

SEQ ID NO: 14288 - DNA, 21 bp, synthetic construct
  misc_feature 1..21: note = Synthetic
  source 1..21: mol_type = other DNA
gttcatttaagaaatttaatt

SEQ ID NO: 14289 - DNA, 21 bp, synthetic construct
  misc_feature 1..21: note = Synthetic
  source 1..21: mol_type = other DNA
gttccccagtcagtccagtac

SEQ ID NO: 14290 - DNA, 21 bp, synthetic construct
  misc_feature 1..21: note = Synthetic
  source 1..21: mol_type = other DNA
gttccctgcactgggggggac

SEQ ID NO: 14291 - DNA, 21 bp, synthetic construct
  misc_feature 1..21: note = Synthetic
  source 1..21: mol_type = other DNA
gttcctcaggttggggatgag

SEQ ID NO: 14292 - DNA, 21 bp, synthetic construct
  misc_feature 1..21: note = Synthetic
  source 1..21: mol_type = other DNA
gttcgtgcaaataatctttgt

SEQ ID NO: 14293 - DNA, 21 bp, synthetic construct
  misc_feature 1..21: note = Synthetic
  source 1..21: mol_type = other DNA
gttctccctgaataacgtttt

SEQ ID NO: 14294 - DNA, 21 bp, synthetic construct
  misc_feature 1..21: note = Synthetic
  source 1..21: mol_type = other DNA
gttctcgatattcacgatcac

SEQ ID NO: 14295 - DNA, 21 bp, synthetic construct
  misc_feature 1..21: note = Synthetic
  source 1..21: mol_type = other DNA
gttctgcctcccagatgaata

SEQ ID NO: 14296 - DNA, 21 bp, synthetic construct
  misc_feature 1..21: note = Synthetic
  source 1..21: mol_type = other DNA
gttctgggcagggacgggact

SEQ ID NO: 14297 - DNA, 21 bp, synthetic construct
  misc_feature 1..21: note = Synthetic
  source 1..21: mol_type = other DNA
gttcttaagccgccagttctt

SEQ ID NO: 14298 - DNA, 21 bp, synthetic construct
  misc_feature 1..21: note = Synthetic
  source 1..21: mol_type = other DNA
gttcttccatagaaggaagac

SEQ ID NO: 14299 - DNA, 21 bp, synthetic construct
  misc_feature 1..21: note = Synthetic
  source 1..21: mol_type = other DNA
gttgaaagccacttgcttctc

SEQ ID NO: 14300 - DNA, 21 bp, synthetic construct
  misc_feature 1..21: note = Synthetic
  source 1..21: mol_type = other DNA
gttgacacggcccccacagct

SEQ ID NO: 14301 - DNA, 21 bp, synthetic construct
  misc_feature 1..21: note = Synthetic
  source 1..21: mol_type = other DNA
gttgacatcgatgcttgagat

SEQ ID NO: 14302 - DNA, 21 bp, synthetic construct
  misc_feature 1..21: note = Synthetic
  source 1..21: mol_type = other DNA
gttgacatcggaacctgtgag

SEQ ID NO: 14303 - DNA, 21 bp, synthetic construct
  misc_feature 1..21: note = Synthetic
  source 1..21: mol_type = other DNA
gttgactcctgagtttagggg

SEQ ID NO: 14304 - DNA, 21 bp, synthetic construct
  misc_feature 1..21: note = Synthetic
  source 1..21: mol_type = other DNA
gttgatctgcggggcagggag

SEQ ID NO: 14305 - DNA, 21 bp, synthetic construct
  misc_feature 1..21: note = Synthetic
  source 1..21: mol_type = other DNA
gttgatgatatctgtccaaaa

SEQ ID NO: 14306 - DNA, 21 bp, synthetic construct
  misc_feature 1..21: note = Synthetic
  source 1..21: mol_type = other DNA
gttgatgctgttgatgttctt

SEQ ID NO: 14307 - DNA, 21 bp, synthetic construct
  misc_feature 1..21: note = Synthetic
  source 1..21: mol_type = other DNA
gttgatgttcttaagccgcca

SEQ ID NO: 14308 - DNA, 21 bp, synthetic construct
  misc_feature 1..21: note = Synthetic
  source 1..21: mol_type = other DNA
gttgcacacagtccagttcgt

SEQ ID NO: 14309 - DNA, 21 bp, synthetic construct
  misc_feature 1..21: note = Synthetic
  source 1..21: mol_type = other DNA
gttgcactggaagctggcggg

SEQ ID NO: 14310 - DNA, 21 bp, synthetic construct
  misc_feature 1..21: note = Synthetic
  source 1..21: mol_type = other DNA
gttgcagactttgtccagggt

SEQ ID NO: 14311 - DNA, 21 bp, synthetic construct
  misc_feature 1..21: note = Synthetic
  source 1..21: mol_type = other DNA
gttgcccaggctggaaagcag

SEQ ID NO: 14312 - DNA, 21 bp, synthetic construct
  misc_feature 1..21: note = Synthetic
  source 1..21: mol_type = other DNA
gttgcccaggctggagtgcag

SEQ ID NO: 14313 - DNA, 21 bp, synthetic construct
  misc_feature 1..21: note = Synthetic
  source 1..21: mol_type = other DNA
gttgcccccgttgacatcgat

SEQ ID NO: 14314 - DNA, 21 bp, synthetic construct
  misc_feature 1..21: note = Synthetic
  source 1..21: mol_type = other DNA
gttgctcaggcctggtctcca

SEQ ID NO: 14315 - DNA, 21 bp, synthetic construct
  misc_feature 1..21: note = Synthetic
  source 1..21: mol_type = other DNA
gttgctgtggatccagtccac

SEQ ID NO: 14316 - DNA, 21 bp, synthetic construct
  misc_feature 1..21: note = Synthetic
  source 1..21: mol_type = other DNA
gttggcactgaaaatggcttc

SEQ ID NO: 14317 - DNA, 21 bp, synthetic construct
  misc_feature 1..21: note = Synthetic
  source 1..21: mol_type = other DNA
gttggggatgaggctggtgta

SEQ ID NO: 14318 - DNA, 21 bp, synthetic construct
  misc_feature 1..21: note = Synthetic
  source 1..21: mol_type = other DNA
gttgggtccctcgcagagtgt

SEQ ID NO: 14319 - DNA, 21 bp, synthetic construct
  misc_feature 1..21: note = Synthetic
  source 1..21: mol_type = other DNA
gttggtcccgcactctttgat

SEQ ID NO: 14320 - DNA, 21 bp, synthetic construct
  misc_feature 1..21: note = Synthetic
  source 1..21: mol_type = other DNA
gttggtgaagaagaggtaggc

SEQ ID NO: 14321 - DNA, 21 bp, synthetic construct
  misc_feature 1..21: note = Synthetic
  source 1..21: mol_type = other DNA
gttggtgccatctgctgttgt

SEQ ID NO: 14322 - DNA, 21 bp, synthetic construct
  misc_feature 1..21: note = Synthetic
  source 1..21: mol_type = other DNA
gttgtatttctgaaatagggt

SEQ ID NO: 14323 - DNA, 21 bp, synthetic construct
  misc_feature 1..21: note = Synthetic
  source 1..21: mol_type = other DNA
gttgtcaaagttgatgctgtt

SEQ ID NO: 14324 - DNA, 21 bp, synthetic construct
  misc_feature 1..21: note = Synthetic
  source 1..21: mol_type = other DNA
gttgtccaagcattcgttggt

SEQ ID NO: 14325 - DNA, 21 bp, synthetic construct
  misc_feature 1..21: note = Synthetic
  source 1..21: mol_type = other DNA
gttgtcgcaggcccacagctg

SEQ ID NO: 14326 - DNA, 21 bp, synthetic construct
  misc_feature 1..21: note = Synthetic
  source 1..21: mol_type = other DNA
gttgtcgcagtccacttggcc

SEQ ID NO: 14327 - DNA, 21 bp, synthetic construct
  misc_feature 1..21: note = Synthetic
  source 1..21: mol_type = other DNA
gttgtggaagagaaccatatc

SEQ ID NO: 14328 - DNA, 21 bp, synthetic construct
  misc_feature 1..21: note = Synthetic
  source 1..21: mol_type = other DNA
gttgtggcaaatgtggacctc

SEQ ID NO: 14329 - DNA, 21 bp, synthetic construct
  misc_feature 1..21: note = Synthetic
  source 1..21: mol_type = other DNA
gttgtgtgctgtgtccttacg

SEQ ID NO: 14330 - DNA, 21 bp, synthetic construct
  misc_feature 1..21: note = Synthetic
  source 1..21: mol_type = other DNA
gttgtgtgttgaaagccactt

SEQ ID NO: 14331 - DNA, 21 bp, synthetic construct
  misc_feature 1..21: note = Synthetic
  source 1..21: mol_type = other DNA
gttgttgtccaagcattcgtt

SEQ ID NO: 14332 - DNA, 21 bp, synthetic construct
  misc_feature 1..21: note = Synthetic
  source 1..21: mol_type = other DNA
gtttaaaaagtgacacccatc

SEQ ID NO: 14333 - DNA, 21 bp, synthetic construct
  misc_feature 1..21: note = Synthetic
  source 1..21: mol_type = other DNA
gtttaggggtttggcttagag

SEQ ID NO: 14334 - DNA, 21 bp, synthetic construct
  misc_feature 1..21: note = Synthetic
  source 1..21: mol_type = other DNA
gtttcaaccaatatacaaagt

SEQ ID NO: 14335 - DNA, 21 bp, synthetic construct
  misc_feature 1..21: note = Synthetic
  source 1..21: mol_type = other DNA
gtttcaacctcgtaaggaacc

SEQ ID NO: 14336 - DNA, 21 bp, synthetic construct
  misc_feature 1..21: note = Synthetic
  source 1..21: mol_type = other DNA
gtttcacgtgttagccaggat

SEQ ID NO: 14337 - DNA, 21 bp, synthetic construct
  misc_feature 1..21: note = Synthetic
  source 1..21: mol_type = other DNA
gtttccatcagagcactggaa

SEQ ID NO: 14338 - DNA, 21 bp, synthetic construct
  misc_feature 1..21: note = Synthetic
  source 1..21: mol_type = other DNA
gtttctcttatccttcacgag

SEQ ID NO: 14339 - DNA, 21 bp, synthetic construct
  misc_feature 1..21: note = Synthetic
  source 1..21: mol_type = other DNA
gtttctttcgcatctgtcgcc

SEQ ID NO: 14340 - DNA, 21 bp, synthetic construct
  misc_feature 1..21: note = Synthetic
  source 1..21: mol_type = other DNA
gtttgaggattgtgtcacggt

SEQ ID NO: 14341 - DNA, 21 bp, synthetic construct
  misc_feature 1..21: note = Synthetic
  source 1..21: mol_type = other DNA
gtttgcaaaaataaatagatt

SEQ ID NO: 14342 - DNA, 21 bp, synthetic construct
  misc_feature 1..21: note = Synthetic
  source 1..21: mol_type = other DNA
gtttggagtcaacccagtaga

SEQ ID NO: 14343 - DNA, 21 bp, synthetic construct
  misc_feature 1..21: note = Synthetic
  source 1..21: mol_type = other DNA
gtttggcttagagattggtgg

SEQ ID NO: 14344 - DNA, 21 bp, synthetic construct
  misc_feature 1..21: note = Synthetic
  source 1..21: mol_type = other DNA
gtttggtctcggtgccaccac

SEQ ID NO: 14345 - DNA, 21 bp, synthetic construct
  misc_feature 1..21: note = Synthetic
  source 1..21: mol_type = other DNA
gttttaaacacatacccatca

SEQ ID NO: 14346 - DNA, 21 bp, synthetic construct
  misc_feature 1..21: note = Synthetic
  source 1..21: mol_type = other DNA
gttttcagccaacaagttgac

SEQ ID NO: 14347 - DNA, 21 bp, synthetic construct
  misc_feature 1..21: note = Synthetic
  source 1..21: mol_type = other DNA
gttttcagtcaccagcgagta

SEQ ID NO: 14348 - DNA, 21 bp, synthetic construct
  misc_feature 1..21: note = Synthetic
  source 1..21: mol_type = other DNA
gttttcctcgtcagatttgtc

SEQ ID NO: 14349 - DNA, 21 bp, synthetic construct
  misc_feature 1..21: note = Synthetic
  source 1..21: mol_type = other DNA
gttttcctcttcacgcccttg

SEQ ID NO: 14350 - DNA, 21 bp, synthetic construct
  misc_feature 1..21: note = Synthetic
  source 1..21: mol_type = other DNA
gttttgtccctggggacaatt

SEQ ID NO: 14351 - DNA, 21 bp, synthetic construct
  misc_feature 1..21: note = Synthetic
  source 1..21: mol_type = other DNA
gtttttgtagagatgggatct

SEQ ID NO: 14352 - DNA, 21 bp, synthetic construct
  misc_feature 1..21: note = Synthetic
  source 1..21: mol_type = other DNA
gtttttttttgtttttttttt

SEQ ID NO: 14353 - DNA, 21 bp, synthetic construct
  misc_feature 1..21: note = Synthetic
  source 1..21: mol_type = other DNA
gttttttttttttgagacgga

SEQ ID NO: 14354 - DNA, 21 bp, synthetic construct
  misc_feature 1..21: note = Synthetic
  source 1..21: mol_type = other DNA
taaaaagtgacacccatctcc

SEQ ID NO: 14355 - DNA, 21 bp, synthetic construct
  misc_feature 1..21: note = Synthetic
  source 1..21: mol_type = other DNA
taaaacaaagctctggcaggc

SEQ ID NO: 14356 - DNA, 21 bp, synthetic construct
  misc_feature 1..21: note = Synthetic
  source 1..21: mol_type = other DNA
taaaacaaggccggcgaggtc

SEQ ID NO: 14357 - DNA, 21 bp, synthetic construct
  misc_feature 1..21: note = Synthetic
  source 1..21: mol_type = other DNA
taaacacatacccatcaacga

SEQ ID NO: 14358 - DNA, 21 bp, synthetic construct
  misc_feature 1..21: note = Synthetic
  source 1..21: mol_type = other DNA
taaacacgttgactcctgagt

SEQ ID NO: 14359 - DNA, 21 bp, synthetic construct
  misc_feature 1..21: note = Synthetic
  source 1..21: mol_type = other DNA
taaacttgggcgagtgggggt

SEQ ID NO: 14360 - DNA, 21 bp, synthetic construct
  misc_feature 1..21: note = Synthetic
  source 1..21: mol_type = other DNA
taaagaagaggcatttcagag

SEQ ID NO: 14361 - DNA, 21 bp, synthetic construct
  misc_feature 1..21: note = Synthetic
  source 1..21: mol_type = other DNA
taaagacccctacagcgctgc

SEQ ID NO: 14362 - DNA, 21 bp, synthetic construct
  misc_feature 1..21: note = Synthetic
  source 1..21: mol_type = other DNA
taaagacgacaatggcagttc

SEQ ID NO: 14363 - DNA, 21 bp, synthetic construct
  misc_feature 1..21: note = Synthetic
  source 1..21: mol_type = other DNA
taaatagattttatatatatg

SEQ ID NO: 14364 - DNA, 21 bp, synthetic construct
  misc_feature 1..21: note = Synthetic
  source 1..21: mol_type = other DNA
taaatatataaaacaaagctc

SEQ ID NO: 14365 - DNA, 21 bp, synthetic construct
  misc_feature 1..21: note = Synthetic
  source 1..21: mol_type = other DNA
taaatattaagggtgaccagt

SEQ ID NO: 14366 - DNA, 21 bp, synthetic construct
  misc_feature 1..21: note = Synthetic
  source 1..21: mol_type = other DNA
taacaaaaaatccccactatc

SEQ ID NO: 14367 - DNA, 21 bp, synthetic construct
  misc_feature 1..21: note = Synthetic
  source 1..21: mol_type = other DNA
taacacaaatgccaaatgtac

SEQ ID NO: 14368 - DNA, 21 bp, synthetic construct
  misc_feature 1..21: note = Synthetic
  source 1..21: mol_type = other DNA
taacacggcgatttcagaaag

SEQ ID NO: 14369 - DNA, 21 bp, synthetic construct
  misc_feature 1..21: note = Synthetic
  source 1..21: mol_type = other DNA
taacagtttcaaccaatatac

SEQ ID NO: 14370 - DNA, 21 bp, synthetic construct
  misc_feature 1..21: note = Synthetic
  source 1..21: mol_type = other DNA
taaccccctacacagggcccc

SEQ ID NO: 14371 - DNA, 21 bp, synthetic construct
  misc_feature 1..21: note = Synthetic
  source 1..21: mol_type = other DNA
taaccgggtgtctcaggcact

SEQ ID NO: 14372 - DNA, 21 bp, synthetic construct
  misc_feature 1..21: note = Synthetic
  source 1..21: mol_type = other DNA
taacctggctgtctagcaagg

SEQ ID NO: 14373 - DNA, 21 bp, synthetic construct
  misc_feature 1..21: note = Synthetic
  source 1..21: mol_type = other DNA
taacgcagccaacttcatcgc

SEQ ID NO: 14374 - DNA, 21 bp, synthetic construct
  misc_feature 1..21: note = Synthetic
  source 1..21: mol_type = other DNA
taacggagggcgactcgtgta

SEQ ID NO: 14375 - DNA, 21 bp, synthetic construct
  misc_feature 1..21: note = Synthetic
  source 1..21: mol_type = other DNA
taacgttttcctcttcacgcc

SEQ ID NO: 14376 - DNA, 21 bp, synthetic construct
  misc_feature 1..21: note = Synthetic
  source 1..21: mol_type = other DNA
taactttttggtttttgtaga

SEQ ID NO: 14377 - DNA, 21 bp, synthetic construct
  misc_feature 1..21: note = Synthetic
  source 1..21: mol_type = other DNA
taagaaatttaattgatcaca

SEQ ID NO: 14378 - DNA, 21 bp, synthetic construct
  misc_feature 1..21: note = Synthetic
  source 1..21: mol_type = other DNA
taagacattcaggctacaaaa

SEQ ID NO: 14379 - DNA, 21 bp, synthetic construct
  misc_feature 1..21: note = Synthetic
  source 1..21: mol_type = other DNA
taagagatggggtcttactat

SEQ ID NO: 14380 - DNA, 21 bp, synthetic construct
  misc_feature 1..21: note = Synthetic
  source 1..21: mol_type = other DNA
taagccgccagttcttccata

SEQ ID NO: 14381 - DNA, 21 bp, synthetic construct
  misc_feature 1..21: note = Synthetic
  source 1..21: mol_type = other DNA
taaggaaccgaggccttgagg

SEQ ID NO: 14382 - DNA, 21 bp, synthetic construct
  misc_feature 1..21: note = Synthetic
  source 1..21: mol_type = other DNA
taaggaaggtacaaacccacc

SEQ ID NO: 14383 - DNA, 21 bp, synthetic construct
  misc_feature 1..21: note = Synthetic
  source 1..21: mol_type = other DNA
taagggtgaccagtgactcag

SEQ ID NO: 14384 - DNA, 21 bp, synthetic construct
  misc_feature 1..21: note = Synthetic
  source 1..21: mol_type = other DNA
taaggtcattgcagacgtggg

SEQ ID NO: 14385 - DNA, 21 bp, synthetic construct
  misc_feature 1..21: note = Synthetic
  source 1..21: mol_type = other DNA
taagtgataacagtttcaacc

SEQ ID NO: 14386 - DNA, 21 bp, synthetic construct
  misc_feature 1..21: note = Synthetic
  source 1..21: mol_type = other DNA
taataaatattaagggtgacc

SEQ ID NO: 14387 - DNA, 21 bp, synthetic construct
  misc_feature 1..21: note = Synthetic
  source 1..21: mol_type = other DNA
taataacacaaatgccaaatg

SEQ ID NO: 14388 - DNA, 21 bp, synthetic construct
  misc_feature 1..21: note = Synthetic
  source 1..21: mol_type = other DNA
taatcatagctcacgacagcc

SEQ ID NO: 14389 - DNA, 21 bp, synthetic construct
  misc_feature 1..21: note = Synthetic
  source 1..21: mol_type = other DNA
taatctttgtacataaagaag

SEQ ID NO: 14390 - DNA, 21 bp, synthetic construct
  misc_feature 1..21: note = Synthetic
  source 1..21: mol_type = other DNA
taattgatcacagtaagacat

SEQ ID NO: 14391 - DNA, 21 bp, synthetic construct
  misc_feature 1..21: note = Synthetic
  source 1..21: mol_type = other DNA
taattttttgtatttttagta

SEQ ID NO: 14392 - DNA, 21 bp, synthetic construct
  misc_feature 1..21: note = Synthetic
  source 1..21: mol_type = other DNA
tacaaaaaccttctatacagt

SEQ ID NO: 14393 - DNA, 21 bp, synthetic construct
  misc_feature 1..21: note = Synthetic
  source 1..21: mol_type = other DNA
tacaaacccacctcgaaagac

SEQ ID NO: 14394 - DNA, 21 bp, synthetic construct
  misc_feature 1..21: note = Synthetic
  source 1..21: mol_type = other DNA
tacaaagtgcaaacataacaa

SEQ ID NO: 14395 - DNA, 21 bp, synthetic construct
  misc_feature 1..21: note = Synthetic
  source 1..21: mol_type = other DNA
tacaacggggacatcattctc

SEQ ID NO: 14396 - DNA, 21 bp, synthetic construct
  misc_feature 1..21: note = Synthetic
  source 1..21: mol_type = other DNA
tacaactctgaactgagaaag

SEQ ID NO: 14397 - DNA, 21 bp, synthetic construct
  misc_feature 1..21: note = Synthetic
  source 1..21: mol_type = other DNA
tacacagggccccgagaatag

SEQ ID NO: 14398 - DNA, 21 bp, synthetic construct
  misc_feature 1..21: note = Synthetic
  source 1..21: mol_type = other DNA
tacacagtgtacaactctgaa

SEQ ID NO: 14399 - DNA, 21 bp, synthetic construct
  misc_feature 1..21: note = Synthetic
  source 1..21: mol_type = other DNA
tacagcaaccagggtttgcaa

SEQ ID NO: 14400 - DNA, 21 bp, synthetic construct
  misc_feature 1..21: note = Synthetic
  source 1..21: mol_type = other DNA
tacagcgctgcggccactcat

SEQ ID NO: 14401 - DNA, 21 bp, synthetic construct
  misc_feature 1..21: note = Synthetic
  source 1..21: mol_type = other DNA
tacaggcgtgagccactgcgc

SEQ ID NO: 14402 - DNA, 21 bp, synthetic construct
  misc_feature 1..21: note = Synthetic
  source 1..21: mol_type = other DNA
tacaggcgtgaggcacctgtg

SEQ ID NO: 14403 - DNA, 21 bp, synthetic construct
  misc_feature 1..21: note = Synthetic
  source 1..21: mol_type = other DNA
tacagggacgcatttacgtgc

SEQ ID NO: 14404 - DNA, 21 bp, synthetic construct
  misc_feature 1..21: note = Synthetic
  source 1..21: mol_type = other DNA
tacaggtgcccgccaccacgc

SEQ ID NO: 14405 - DNA, 21 bp, synthetic construct
  misc_feature 1..21: note = Synthetic
  source 1..21: mol_type = other DNA
tacagtggtttaaaaagtgac

SEQ ID NO: 14406 - DNA, 21 bp, synthetic construct
  misc_feature 1..21: note = Synthetic
  source 1..21: mol_type = other DNA
tacataaagaagaggcatttc

SEQ ID NO: 14407 - DNA, 21 bp, synthetic construct
  misc_feature 1..21: note = Synthetic
  source 1..21: mol_type = other DNA
tacatacaacggggacatcat

SEQ ID NO: 14408 - DNA, 21 bp, synthetic construct
  misc_feature 1..21: note = Synthetic
  source 1..21: mol_type = other DNA
tacatgaagccatgaacagga

SEQ ID NO: 14409 - DNA, 21 bp, synthetic construct
  misc_feature 1..21: note = Synthetic
  source 1..21: mol_type = other DNA
tacccagctgatttttaactt

SEQ ID NO: 14410 - DNA, 21 bp, synthetic construct
  misc_feature 1..21: note = Synthetic
  source 1..21: mol_type = other DNA
tacccatcaacgacaagattg

SEQ ID NO: 14411 - DNA, 21 bp, synthetic construct
  misc_feature 1..21: note = Synthetic
  source 1..21: mol_type = other DNA
tacggctgtggagctgacctt

SEQ ID NO: 14412 - DNA, 21 bp, synthetic construct
  misc_feature 1..21: note = Synthetic
  source 1..21: mol_type = other DNA
tacgtgctccgaaaccagaaa

SEQ ID NO: 14413 - DNA, 21 bp, synthetic construct
  misc_feature 1..21: note = Synthetic
  source 1..21: mol_type = other DNA
tactatgttgcccaggctgga

SEQ ID NO: 14414 - DNA, 21 bp, synthetic construct
  misc_feature 1..21: note = Synthetic
  source 1..21: mol_type = other DNA
tactcgctccggtccagcgtc

SEQ ID NO: 14415 - DNA, 21 bp, synthetic construct
  misc_feature 1..21: note = Synthetic
  source 1..21: mol_type = other DNA
tactggcagccgccattgctc

SEQ ID NO: 14416 - DNA, 21 bp, synthetic construct
  misc_feature 1..21: note = Synthetic
  source 1..21: mol_type = other DNA
tactgggcttcttctcatttc

SEQ ID NO: 14417 - DNA, 21 bp, synthetic construct
  misc_feature 1..21: note = Synthetic
  source 1..21: mol_type = other DNA
tactgtccccttggaacacgt

SEQ ID NO: 14418 - DNA, 21 bp, synthetic construct
  misc_feature 1..21: note = Synthetic
  source 1..21: mol_type = other DNA
tactttgtcctcaaagacggc

SEQ ID NO: 14419 - DNA, 21 bp, synthetic construct
  misc_feature 1..21: note = Synthetic
  source 1..21: mol_type = other DNA
tagaagaggtaaacacgttga

SEQ ID NO: 14420 - DNA, 21 bp, synthetic construct
  misc_feature 1..21: note = Synthetic
  source 1..21: mol_type = other DNA
tagaaggaagacccccaggca

SEQ ID NO: 14421 - DNA, 21 bp, synthetic construct
  misc_feature 1..21: note = Synthetic
  source 1..21: mol_type = other DNA
tagaagtggaagcactaggtg

SEQ ID NO: 14422 - DNA, 21 bp, synthetic construct
  misc_feature 1..21: note = Synthetic
  source 1..21: mol_type = other DNA
tagacggggttgtcaaagttg

SEQ ID NO: 14423 - DNA, 21 bp, synthetic construct
  misc_feature 1..21: note = Synthetic
  source 1..21: mol_type = other DNA
tagagacggggtttcacgtgt

SEQ ID NO: 14424 - DNA, 21 bp, synthetic construct
  misc_feature 1..21: note = Synthetic
  source 1..21: mol_type = other DNA
tagagatgggatctcgctttg

SEQ ID NO: 14425 - DNA, 21 bp, synthetic construct
  misc_feature 1..21: note = Synthetic
  source 1..21: mol_type = other DNA
tagagattggtggatgaggca

SEQ ID NO: 14426 - DNA, 21 bp, synthetic construct
  misc_feature 1..21: note = Synthetic
  source 1..21: mol_type = other DNA
tagaggcggccactgaggaga

SEQ ID NO: 14427 - DNA, 21 bp, synthetic construct
  misc_feature 1..21: note = Synthetic
  source 1..21: mol_type = other DNA
tagatgtccacaccattcagg

SEQ ID NO: 14428 - DNA, 21 bp, synthetic construct
  misc_feature 1..21: note = Synthetic
  source 1..21: mol_type = other DNA
tagatgttgctgtggatccag

SEQ ID NO: 14429 - DNA, 21 bp, synthetic construct
  misc_feature 1..21: note = Synthetic
  source 1..21: mol_type = other DNA
tagattctattgctggccacc

SEQ ID NO: 14430 - DNA, 21 bp, synthetic construct
  misc_feature 1..21: note = Synthetic
  source 1..21: mol_type = other DNA
tagattttatatatatgtgtg

SEQ ID NO: 14431 - DNA, 21 bp, synthetic construct
  misc_feature 1..21: note = Synthetic
  source 1..21: mol_type = other DNA
tagcaaggcttgcatagaaga

SEQ ID NO: 14432 - DNA, 21 bp, synthetic construct
  misc_feature 1..21: note = Synthetic
  source 1..21: mol_type = other DNA
tagccaccctccaggttcacg

SEQ ID NO: 14433 - DNA, 21 bp, synthetic construct
  misc_feature 1..21: note = Synthetic
  source 1..21: mol_type = other DNA
tagccaggatggtctcgatct

SEQ ID NO: 14434 - DNA, 21 bp, synthetic construct
  misc_feature 1..21: note = Synthetic
  source 1..21: mol_type = other DNA
tagccatgttgcagactttgt

SEQ ID NO: 14435 - DNA, 21 bp, synthetic construct
  misc_feature 1..21: note = Synthetic
  source 1..21: mol_type = other DNA
tagccgatcttaaggtcattg

SEQ ID NO: 14436 - DNA, 21 bp, synthetic construct
  misc_feature 1..21: note = Synthetic
  source 1..21: mol_type = other DNA
tagccgtcctggttgtggcaa

SEQ ID NO: 14437 - DNA, 21 bp, synthetic construct
  misc_feature 1..21: note = Synthetic
  source 1..21: mol_type = other DNA
tagcctgacggtggatgtctc

SEQ ID NO: 14438 - DNA, 21 bp, synthetic construct
  misc_feature 1..21: note = Synthetic
  source 1..21: mol_type = other DNA
tagctcacgacagcctcaaat

SEQ ID NO: 14439 - DNA, 21 bp, synthetic construct
  misc_feature 1..21: note = Synthetic
  source 1..21: mol_type = other DNA
tagctggaaaccctggcttcc

SEQ ID NO: 14440 - DNA, 21 bp, synthetic construct
  misc_feature 1..21: note = Synthetic
  source 1..21: mol_type = other DNA
tagctgggactacaggtgccc

SEQ ID NO: 14441 - DNA, 21 bp, synthetic construct
  misc_feature 1..21: note = Synthetic
  source 1..21: mol_type = other DNA
tagctgggatcacaggcacgt

SEQ ID NO: 14442 - DNA, 21 bp, synthetic construct
  misc_feature 1..21: note = Synthetic
  source 1..21: mol_type = other DNA
tagctgtagccgtcctggttg

SEQ ID NO: 14443 - DNA, 21 bp, synthetic construct
  misc_feature 1..21: note = Synthetic
  source 1..21: mol_type = other DNA
taggaagagacgccgtgggct

SEQ ID NO: 14444 - DNA, 21 bp, synthetic construct
  misc_feature 1..21: note = Synthetic
  source 1..21: mol_type = other DNA
taggagatgcatttcccgtct

SEQ ID NO: 14445 - DNA, 21 bp, synthetic construct
  misc_feature 1..21: note = Synthetic
  source 1..21: mol_type = other DNA
taggcagtggaactcgaaggc

SEQ ID NO: 14446 - DNA, 21 bp, synthetic construct
  misc_feature 1..21: note = Synthetic
  source 1..21: mol_type = other DNA
taggcgatggagcccacagcc

SEQ ID NO: 14447 - DNA, 21 bp, synthetic construct
  misc_feature 1..21: note = Synthetic
  source 1..21: mol_type = other DNA
tagggagaggcacgctctgtc

SEQ ID NO: 14448 - DNA, 21 bp, synthetic construct
  misc_feature 1..21: note = Synthetic
  source 1..21: mol_type = other DNA
taggggtcgggaggatgggca

SEQ ID NO: 14449 - DNA, 21 bp, synthetic construct
  misc_feature 1..21: note = Synthetic
  source 1..21: mol_type = other DNA
taggggtttggcttagagatt

SEQ ID NO: 14450 - DNA, 21 bp, synthetic construct
  misc_feature 1..21: note = Synthetic
  source 1..21: mol_type = other DNA
tagggtcttcatctgttgccc

SEQ ID NO: 14451 - DNA, 21 bp, synthetic construct
  misc_feature 1..21: note = Synthetic
  source 1..21: mol_type = other DNA
tagggtgatgccattgggcca

SEQ ID NO: 14452 - DNA, 21 bp, synthetic construct
  misc_feature 1..21: note = Synthetic
  source 1..21: mol_type = other DNA
taggtgggcggacataaagac

SEQ ID NO: 14453 - DNA, 21 bp, synthetic construct
  misc_feature 1..21: note = Synthetic
  source 1..21: mol_type = other DNA
taggttttcagccaacaagtt

SEQ ID NO: 14454 - DNA, 21 bp, synthetic construct
  misc_feature 1..21: note = Synthetic
  source 1..21: mol_type = other DNA
tagtagagacggggtttcacg

SEQ ID NO: 14455 - DNA, 21 bp, synthetic construct
  misc_feature 1..21: note = Synthetic
  source 1..21: mol_type = other DNA
tagtcactgaacaaatacagc

SEQ ID NO: 14456 - DNA, 21 bp, synthetic construct
  misc_feature 1..21: note = Synthetic
  source 1..21: mol_type = other DNA
tagttgtatttctgaaatagg

SEQ ID NO: 14457 - DNA, 21 bp, synthetic construct
  misc_feature 1..21: note = Synthetic
  source 1..21: mol_type = other DNA
tataaaacaaagctctggcag

SEQ ID NO: 14458 - DNA, 21 bp, synthetic construct
  misc_feature 1..21: note = Synthetic
  source 1..21: mol_type = other DNA
tataagtgataacagtttcaa

SEQ ID NO: 14459 - DNA, 21 bp, synthetic construct
  misc_feature 1..21: note = Synthetic
  source 1..21: mol_type = other DNA
tatacaaagtgcaaacataac

SEQ ID NO: 14460 - DNA, 21 bp, synthetic construct
  misc_feature 1..21: note = Synthetic
  source 1..21: mol_type = other DNA
tatacagtggtttaaaaagtg

SEQ ID NO: 14461 - DNA, 21 bp, synthetic construct
  misc_feature 1..21: note = Synthetic
  source 1..21: mol_type = other DNA
tatagttgtatttctgaaata

SEQ ID NO: 14462 - DNA, 21 bp, synthetic construct
  misc_feature 1..21: note = Synthetic
  source 1..21: mol_type = other DNA
tatataaaacaaagctctggc

SEQ ID NO: 14463 - DNA, 21 bp, synthetic construct
  misc_feature 1..21: note = Synthetic
  source 1..21: mol_type = other DNA
tatataagtgataacagtttc

SEQ ID NO: 14464 - DNA, 21 bp, synthetic construct
  misc_feature 1..21: note = Synthetic
  source 1..21: mol_type = other DNA
tatatataagtgataacagtt

SEQ ID NO: 14465 - DNA, 21 bp, synthetic construct
  misc_feature 1..21: note = Synthetic
  source 1..21: mol_type = other DNA
tatatatataagtgataacag

SEQ ID NO: 14466 - DNA, 21 bp, synthetic construct
  misc_feature 1..21: note = Synthetic
  source 1..21: mol_type = other DNA
tatatatatataagtgataac

SEQ ID NO: 14467 - DNA, 21 bp, synthetic construct
  misc_feature 1..21: note = Synthetic
  source 1..21: mol_type = other DNA
tatatatatatataagtgata

SEQ ID NO: 14468 - DNA, 21 bp, synthetic construct
  misc_feature 1..21: note = Synthetic
  source 1..21: mol_type = other DNA
tatatatatatatataagtga

SEQ ID NO: 14469 - DNA, 21 bp, synthetic construct
  misc_feature 1..21: note = Synthetic
  source 1..21: mol_type = other DNA
tatatatatgtgtgtatatat

SEQ ID NO: 14470 - DNA, 21 bp, synthetic construct
  misc_feature 1..21: note = Synthetic
  source 1..21: mol_type = other DNA
tatatatgtgtgtatatatat

SEQ ID NO: 14471 - DNA, 21 bp, synthetic construct
  misc_feature 1..21: note = Synthetic
  source 1..21: mol_type = other DNA
tatatgtgtgtatatatatat

SEQ ID NO: 14472 - DNA, 21 bp, synthetic construct
  misc_feature 1..21: note = Synthetic
  source 1..21: mol_type = other DNA
tatcacggttccctgcactgg

SEQ ID NO: 14473 - DNA, 21 bp, synthetic construct
  misc_feature 1..21: note = Synthetic
  source 1..21: mol_type = other DNA
tatccgcaacagagacagtgc

SEQ ID NO: 14474 - DNA, 21 bp, synthetic construct
  misc_feature 1..21: note = Synthetic
  source 1..21: mol_type = other DNA
tatcctctggggacagtaggt

SEQ ID NO: 14475 - DNA, 21 bp, synthetic construct
  misc_feature 1..21: note = Synthetic
  source 1..21: mol_type = other DNA
tatccttcacgaggaaaggaa

SEQ ID NO: 14476 - DNA, 21 bp, synthetic construct
  misc_feature 1..21: note = Synthetic
  source 1..21: mol_type = other DNA
tatcgcactctttgatgggtt

SEQ ID NO: 14477 - DNA, 21 bp, synthetic construct
  misc_feature 1..21: note = Synthetic
  source 1..21: mol_type = other DNA
tatctccaccgtggtgagccc

SEQ ID NO: 14478 - DNA, 21 bp, synthetic construct
  misc_feature 1..21: note = Synthetic
  source 1..21: mol_type = other DNA
tatctgtacagggacgcattt

SEQ ID NO: 14479 - DNA, 21 bp, synthetic construct
  misc_feature 1..21: note = Synthetic
  source 1..21: mol_type = other DNA
tatctgtccaaaatactttgt

SEQ ID NO: 14480 - DNA, 21 bp, synthetic construct
  misc_feature 1..21: note = Synthetic
  source 1..21: mol_type = other DNA
tatcttcgcatcttcgctggg

SEQ ID NO: 14481 - DNA, 21 bp, synthetic construct
  misc_feature 1..21: note = Synthetic
  source 1..21: mol_type = other DNA
tatgtcgcggaggcggctccg

SEQ ID NO: 14482 - DNA, 21 bp, synthetic construct
  misc_feature 1..21: note = Synthetic
  source 1..21: mol_type = other DNA
tatgtgtgtatatatatatat

SEQ ID NO: 14483 - DNA, 21 bp, synthetic construct
  misc_feature 1..21: note = Synthetic
  source 1..21: mol_type = other DNA
tatgttgcccaggctggaaag

SEQ ID NO: 14484 - DNA, 21 bp, synthetic construct
  misc_feature 1..21: note = Synthetic
  source 1..21: mol_type = other DNA
tattaagggtgaccagtgact

SEQ ID NO: 14485 - DNA, 21 bp, synthetic construct
  misc_feature 1..21: note = Synthetic
  source 1..21: mol_type = other DNA
tattcacgatcacggctttga

SEQ ID NO: 14486 - DNA, 21 bp, synthetic construct
  misc_feature 1..21: note = Synthetic
  source 1..21: mol_type = other DNA
tattcccggtcacactgccgg

SEQ ID NO: 14487 - DNA, 21 bp, synthetic construct
  misc_feature 1..21: note = Synthetic
  source 1..21: mol_type = other DNA
tattgctggccacctccgtgt

SEQ ID NO: 14488 - DNA, 21 bp, synthetic construct
  misc_feature 1..21: note = Synthetic
  source 1..21: mol_type = other DNA
tatttatttttttatagttgt

SEQ ID NO: 14489 - DNA, 21 bp, synthetic construct
  misc_feature 1..21: note = Synthetic
  source 1..21: mol_type = other DNA
tatttctgaaatagggtcttc

SEQ ID NO: 14490 - DNA, 21 bp, synthetic construct
  misc_feature 1..21: note = Synthetic
  source 1..21: mol_type = other DNA
tatttttagtagagacggggt

SEQ ID NO: 14491 - DNA, 21 bp, synthetic construct
  misc_feature 1..21: note = Synthetic
  source 1..21: mol_type = other DNA
tatttttttatagttgtattt

SEQ ID NO: 14492 - DNA, 21 bp, synthetic construct
  misc_feature 1..21: note = Synthetic
  source 1..21: mol_type = other DNA
tcaaaacttcctggagagaaa

SEQ ID NO: 14493 - DNA, 21 bp, synthetic construct
  misc_feature 1..21: note = Synthetic
  source 1..21: mol_type = other DNA
tcaaaccatcctcccacctca

SEQ ID NO: 14494 - DNA, 21 bp, synthetic construct
  misc_feature 1..21: note = Synthetic
  source 1..21: mol_type = other DNA
tcaaacgatccagactggagg

SEQ ID NO: 14495 - DNA, 21 bp, synthetic construct
  misc_feature 1..21: note = Synthetic
  source 1..21: mol_type = other DNA
tcaaagacggccaaggagaag

SEQ ID NO: 14496 - DNA, 21 bp, synthetic construct
  misc_feature 1..21: note = Synthetic
  source 1..21: mol_type = other DNA
tcaaagttgatgctgttgatg

SEQ ID NO: 14497 - DNA, 21 bp, synthetic construct
  misc_feature 1..21: note = Synthetic
  source 1..21: mol_type = other DNA
tcaaatgcctgagctcaaacc

SEQ ID NO: 14498 - DNA, 21 bp, synthetic construct
  misc_feature 1..21: note = Synthetic
  source 1..21: mol_type = other DNA
tcaaccaatatacaaagtgca

SEQ ID NO: 14499 - DNA, 21 bp, synthetic construct
  misc_feature 1..21: note = Synthetic
  source 1..21: mol_type = other DNA
tcaacccagtagaggcggcca

SEQ ID NO: 14500 - DNA, 21 bp, synthetic construct
  misc_feature 1..21: note = Synthetic
  source 1..21: mol_type = other DNA
tcaacctcgtaaggaaccgag

SEQ ID NO: 14501 - DNA, 21 bp, synthetic construct
  misc_feature 1..21: note = Synthetic
  source 1..21: mol_type = other DNA
tcaacctgcccctctctgtcc

SEQ ID NO: 14502 - DNA, 21 bp, synthetic construct
  misc_feature 1..21: note = Synthetic
  source 1..21: mol_type = other DNA
tcaacgacaagattggggaag

SEQ ID NO: 14503 - DNA, 21 bp, synthetic construct
  misc_feature 1..21: note = Synthetic
  source 1..21: mol_type = other DNA
tcaagctgggtgctgcagatc

SEQ ID NO: 14504 - DNA, 21 bp, synthetic construct
  misc_feature 1..21: note = Synthetic
  source 1..21: mol_type = other DNA
tcaagtgatccagctcagcct

SEQ ID NO: 14505 - DNA, 21 bp, synthetic construct
  misc_feature 1..21: note = Synthetic
  source 1..21: mol_type = other DNA
tcacacagctgcccccgagac

SEQ ID NO: 14506 - DNA, 21 bp, synthetic construct
  misc_feature 1..21: note = Synthetic
  source 1..21: mol_type = other DNA
tcacaccagttcactcctctt

SEQ ID NO: 14507 - DNA, 21 bp, synthetic construct
  misc_feature 1..21: note = Synthetic
  source 1..21: mol_type = other DNA
tcacaccattctcctgcctca

SEQ ID NO: 14508 - DNA, 21 bp, synthetic construct
  misc_feature 1..21: note = Synthetic
  source 1..21: mol_type = other DNA
tcacactgccggctgccatgg

SEQ ID NO: 14509 - DNA, 21 bp, synthetic construct
  misc_feature 1..21: note = Synthetic
  source 1..21: mol_type = other DNA
tcacactggcacttgtagcca

SEQ ID NO: 14510 - DNA, 21 bp, synthetic construct
  misc_feature 1..21: note = Synthetic
  source 1..21: mol_type = other DNA
tcacagacgaactgccgagag

SEQ ID NO: 14511 - DNA, 21 bp, synthetic construct
  misc_feature 1..21: note = Synthetic
  source 1..21: mol_type = other DNA
tcacagcgccagctggagtgg

SEQ ID NO: 14512 - DNA, 21 bp, synthetic construct
  misc_feature 1..21: note = Synthetic
  source 1..21: mol_type = other DNA
tcacaggcacgtgccaccgta

SEQ ID NO: 14513 - DNA, 21 bp, synthetic construct
  misc_feature 1..21: note = Synthetic
  source 1..21: mol_type = other DNA
tcacagtaagacattcaggct

SEQ ID NO: 14514 - DNA, 21 bp, synthetic construct
  misc_feature 1..21: note = Synthetic
  source 1..21: mol_type = other DNA
tcacattaacgcagccaactt

SEQ ID NO: 14515 - DNA, 21 bp, synthetic construct
  misc_feature 1..21: note = Synthetic
  source 1..21: mol_type = other DNA
tcaccagcgagtagatgtcca

SEQ ID NO: 14516 - DNA, 21 bp, synthetic construct
  misc_feature 1..21: note = Synthetic
  source 1..21: mol_type = other DNA
tcaccgtgcatgttttaaaca

SEQ ID NO: 14517 - DNA, 21 bp, synthetic construct
  misc_feature 1..21: note = Synthetic
  source 1..21: mol_type = other DNA
tcacgacagcctcaaatgcct

SEQ ID NO: 14518 - DNA, 21 bp, synthetic construct
  misc_feature 1..21: note = Synthetic
  source 1..21: mol_type = other DNA
tcacgacctgctgtgtcctag

SEQ ID NO: 14519 - DNA, 21 bp, synthetic construct
  misc_feature 1..21: note = Synthetic
  source 1..21: mol_type = other DNA
tcacgaggaaaggaagaaacc

SEQ ID NO: 14520 - DNA, 21 bp, synthetic construct
  misc_feature 1..21: note = Synthetic
  source 1..21: mol_type = other DNA
tcacgatcacggctttgaagt

SEQ ID NO: 14521 - DNA, 21 bp, synthetic construct
  misc_feature 1..21: note = Synthetic
  source 1..21: mol_type = other DNA
tcacgcagagctggctgcagg

SEQ ID NO: 14522 - DNA, 21 bp, synthetic construct
  misc_feature 1..21: note = Synthetic
  source 1..21: mol_type = other DNA
tcacgccacgtcatcctccag

SEQ ID NO: 14523 - DNA, 21 bp, synthetic construct
  misc_feature 1..21: note = Synthetic
  source 1..21: mol_type = other DNA
tcacgcccttggtatccgcaa

SEQ ID NO: 14524 - DNA, 21 bp, synthetic construct
  misc_feature 1..21: note = Synthetic
  source 1..21: mol_type = other DNA
tcacgcgggagtctgacggag

SEQ ID NO: 14525 - DNA, 21 bp, synthetic construct
  misc_feature 1..21: note = Synthetic
  source 1..21: mol_type = other DNA
tcacgctactgggcttcttct

SEQ ID NO: 14526 - DNA, 21 bp, synthetic construct
  misc_feature 1..21: note = Synthetic
  source 1..21: mol_type = other DNA
tcacggccaaggtaaccgggt

SEQ ID NO: 14527 - DNA, 21 bp, synthetic construct
  misc_feature 1..21: note = Synthetic
  source 1..21: mol_type = other DNA
tcacggctttgaagtcccggt

SEQ ID NO: 14528 - DNA, 21 bp, synthetic construct
  misc_feature 1..21: note = Synthetic
  source 1..21: mol_type = other DNA
tcacggtggagagaaactcaa

SEQ ID NO: 14529 - DNA, 21 bp, synthetic construct
  misc_feature 1..21: note = Synthetic
  source 1..21: mol_type = other DNA
tcacggttccctgcactgggg

SEQ ID NO: 14530 - DNA, 21 bp, synthetic construct
  misc_feature 1..21: note = Synthetic
  source 1..21: mol_type = other DNA
tcacgtgttagccaggatggt

SEQ ID NO: 14531 - DNA, 21 bp, synthetic construct
  misc_feature 1..21: note = Synthetic
  source 1..21: mol_type = other DNA
tcactatctccaccgtggtga

SEQ ID NO: 14532 - DNA, 21 bp, synthetic construct
  misc_feature 1..21: note = Synthetic
  source 1..21: mol_type = other DNA
tcactcctcttggctgggtga

SEQ ID NO: 14533 - DNA, 21 bp, synthetic construct
  misc_feature 1..21: note = Synthetic
  source 1..21: mol_type = other DNA
tcactgaacaaatacagcaac

SEQ ID NO: 14534 - DNA, 21 bp, synthetic construct
  misc_feature 1..21: note = Synthetic
  source 1..21: mol_type = other DNA
tcactgcaacctccacctcct

SEQ ID NO: 14535 - DNA, 21 bp, synthetic construct
  misc_feature 1..21: note = Synthetic
  source 1..21: mol_type = other DNA
tcactgcaagctccgcttccc

SEQ ID NO: 14536 - DNA, 21 bp, synthetic construct
  misc_feature 1..21: note = Synthetic
  source 1..21: mol_type = other DNA
tcactgtctctccggacatca

SEQ ID NO: 14537 - DNA, 21 bp, synthetic construct
  misc_feature 1..21: note = Synthetic
  source 1..21: mol_type = other DNA
tcagaaagaacctgaagtccc

SEQ ID NO: 14538 - DNA, 21 bp, synthetic construct
  misc_feature 1..21: note = Synthetic
  source 1..21: mol_type = other DNA
tcagacagccttgctcgtctg

SEQ ID NO: 14539 - DNA, 21 bp, synthetic construct
  misc_feature 1..21: note = Synthetic
  source 1..21: mol_type = other DNA
tcagaccagtagattctattg

SEQ ID NO: 14540 - DNA, 21 bp, synthetic construct
  misc_feature 1..21: note = Synthetic
  source 1..21: mol_type = other DNA
tcagagcactggaattcgtca

SEQ ID NO: 14541 - DNA, 21 bp, synthetic construct
  misc_feature 1..21: note = Synthetic
  source 1..21: mol_type = other DNA
tcagagccatcctggcactca

SEQ ID NO: 14542 - DNA, 21 bp, synthetic construct
  misc_feature 1..21: note = Synthetic
  source 1..21: mol_type = other DNA
tcagaggcaataaccccctac

SEQ ID NO: 14543 - DNA, 21 bp, synthetic construct
  misc_feature 1..21: note = Synthetic
  source 1..21: mol_type = other DNA
tcagatttgtccttgcagtcg

SEQ ID NO: 14544 - DNA, 21 bp, synthetic construct
  misc_feature 1..21: note = Synthetic
  source 1..21: mol_type = other DNA
tcagccaacaagttgacatcg

SEQ ID NO: 14545 - DNA, 21 bp, synthetic construct
  misc_feature 1..21: note = Synthetic
  source 1..21: mol_type = other DNA
tcagccagatcatttccgacg

SEQ ID NO: 14546 - DNA, 21 bp, synthetic construct
  misc_feature 1..21: note = Synthetic
  source 1..21: mol_type = other DNA
tcagcctcccaaagtgctggg

SEQ ID NO: 14547 - DNA, 21 bp, synthetic construct
  misc_feature 1..21: note = Synthetic
  source 1..21: mol_type = other DNA
tcagcctcccaagtagctggg

SEQ ID NO: 14548 - DNA, 21 bp, synthetic construct
  misc_feature 1..21: note = Synthetic
  source 1..21: mol_type = other DNA
tcagcctcccgagtagctggg

SEQ ID NO: 14549 - DNA, 21 bp, synthetic construct
  misc_feature 1..21: note = Synthetic
  source 1..21: mol_type = other DNA
tcagcctcgccatgcctggcc

SEQ ID NO: 14550 - DNA, 21 bp, synthetic construct
  misc_feature 1..21: note = Synthetic
  source 1..21: mol_type = other DNA
tcagcctctcttggctgggtg

SEQ ID NO: 14551 - DNA, 21 bp, synthetic construct
  misc_feature 1..21: note = Synthetic
  source 1..21: mol_type = other DNA
tcagcctctgtgaggcagctc

SEQ ID NO: 14552 - DNA, 21 bp, synthetic construct
  misc_feature 1..21: note = Synthetic
  source 1..21: mol_type = other DNA
tcagcgctgccatcgcagacc

SEQ ID NO: 14553 - DNA, 21 bp, synthetic construct
  misc_feature 1..21: note = Synthetic
  source 1..21: mol_type = other DNA
tcaggaagggttctgggcagg

SEQ ID NO: 14554 - DNA, 21 bp, synthetic construct
  misc_feature 1..21: note = Synthetic
  source 1..21: mol_type = other DNA
tcaggcacttaataaatatta

SEQ ID NO: 14555 - DNA, 21 bp, synthetic construct
  misc_feature 1..21: note = Synthetic
  source 1..21: mol_type = other DNA
tcaggccccctttcttgatct

SEQ ID NO: 14556 - DNA, 21 bp, synthetic construct
  misc_feature 1..21: note = Synthetic
  source 1..21: mol_type = other DNA
tcaggcctggtctccaactcc

SEQ ID NO: 14557 - DNA, 21 bp, synthetic construct
  misc_feature 1..21: note = Synthetic
  source 1..21: mol_type = other DNA
tcaggcgatcctcctgcctca

SEQ ID NO: 14558 - DNA, 21 bp, synthetic construct
  misc_feature 1..21: note = Synthetic
  source 1..21: mol_type = other DNA
tcaggctacaaaaaccttcta

SEQ ID NO: 14559 - DNA, 21 bp, synthetic construct
  misc_feature 1..21: note = Synthetic
  source 1..21: mol_type = other DNA
tcaggctctgcctctgggaag

SEQ ID NO: 14560 - DNA, 21 bp, synthetic construct
  misc_feature 1..21: note = Synthetic
  source 1..21: mol_type = other DNA
tcagggcgacaggtggccaca

SEQ ID NO: 14561 - DNA, 21 bp, synthetic construct
  misc_feature 1..21: note = Synthetic
  source 1..21: mol_type = other DNA
tcagggtggtcctctcacacc

SEQ ID NO: 14562 - DNA, 21 bp, synthetic construct
  misc_feature 1..21: note = Synthetic
  source 1..21: mol_type = other DNA
tcaggttggggatgaggctgg

SEQ ID NO: 14563 - DNA, 21 bp, synthetic construct
  misc_feature 1..21: note = Synthetic
  source 1..21: mol_type = other DNA
tcagtcaccagcgagtagatg

SEQ ID NO: 14564 - DNA, 21 bp, synthetic construct
  misc_feature 1..21: note = Synthetic
  source 1..21: mol_type = other DNA
tcagtccagtacatgaagcca

SEQ ID NO: 14565 - DNA, 21 bp, synthetic construct
  misc_feature 1..21: note = Synthetic
  source 1..21: mol_type = other DNA
tcagtgcaacagtaacacggc

SEQ ID NO: 14566 - DNA, 21 bp, synthetic construct
  misc_feature 1..21: note = Synthetic
  source 1..21: mol_type = other DNA
tcatacatacaacggggacat

SEQ ID NO: 14567 - DNA, 21 bp, synthetic construct
  misc_feature 1..21: note = Synthetic
  source 1..21: mol_type = other DNA
tcatagctcacgacagcctca

SEQ ID NO: 14568 - DNA, 21 bp, synthetic construct
  misc_feature 1..21: note = Synthetic
  source 1..21: mol_type = other DNA
tcataggaagagacgccgtgg

SEQ ID NO: 14569 - DNA, 21 bp, synthetic construct
  misc_feature 1..21: note = Synthetic
  source 1..21: mol_type = other DNA
tcatattcccggtcacactgc

SEQ ID NO: 14570 - DNA, 21 bp, synthetic construct
  misc_feature 1..21: note = Synthetic
  source 1..21: mol_type = other DNA
tcatcagagccatcctggcac

SEQ ID NO: 14571 - DNA, 21 bp, synthetic construct
  misc_feature 1..21: note = Synthetic
  source 1..21: mol_type = other DNA
tcatccgagccatcttcgcag

SEQ ID NO: 14572 - DNA, 21 bp, synthetic construct
  misc_feature 1..21: note = Synthetic
  source 1..21: mol_type = other DNA
tcatcctccaagatggtcttc

SEQ ID NO: 14573 - DNA, 21 bp, synthetic construct
  misc_feature 1..21: note = Synthetic
  source 1..21: mol_type = other DNA
tcatcctccagactgaccatc

SEQ ID NO: 14574 - DNA, 21 bp, synthetic construct
  misc_feature 1..21: note = Synthetic
  source 1..21: mol_type = other DNA
tcatcctctgtggtcttctga

SEQ ID NO: 14575 - DNA, 21 bp, synthetic construct
  misc_feature 1..21: note = Synthetic
  source 1..21: mol_type = other DNA
tcatcctggtccccccgggcc

SEQ ID NO: 14576 - DNA, 21 bp, synthetic construct
  misc_feature 1..21: note = Synthetic
  source 1..21: mol_type = other DNA
tcatcgatatcgcactctttg

SEQ ID NO: 14577 - DNA, 21 bp, synthetic construct
  misc_feature 1..21: note = Synthetic
  source 1..21: mol_type = other DNA
tcatcgatatcttcgcatctt

SEQ ID NO: 14578 - DNA, 21 bp, synthetic construct
  misc_feature 1..21: note = Synthetic
  source 1..21: mol_type = other DNA
tcatcgctcatgtccttgcag

SEQ ID NO: 14579 - DNA, 21 bp, synthetic construct
  misc_feature 1..21: note = Synthetic
  source 1..21: mol_type = other DNA
tcatctgaccagtcccggcag

SEQ ID NO: 14580 - DNA, 21 bp, synthetic construct
  misc_feature 1..21: note = Synthetic
  source 1..21: mol_type = other DNA
tcatctgttgcccaggctgga

SEQ ID NO: 14581 - DNA, 21 bp, synthetic construct
  misc_feature 1..21: note = Synthetic
  source 1..21: mol_type = other DNA
tcatcttccatgtttgaggat

SEQ ID NO: 14582 - DNA, 21 bp, synthetic construct
  misc_feature 1..21: note = Synthetic
  source 1..21: mol_type = other DNA
tcatcttcctgacctcgtgcc

SEQ ID NO: 14583 - DNA, 21 bp, synthetic construct
  misc_feature 1..21: note = Synthetic
  source 1..21: mol_type = other DNA
tcatgatccacccgcctcggc

SEQ ID NO: 14584 - DNA, 21 bp, synthetic construct
  misc_feature 1..21: note = Synthetic
  source 1..21: mol_type = other DNA
tcatgattcgggggtgacagg

SEQ ID NO: 14585 - DNA, 21 bp, synthetic construct
  misc_feature 1..21: note = Synthetic
  source 1..21: mol_type = other DNA
tcatggctcactgcaacctcc

SEQ ID NO: 14586 - DNA, 21 bp, synthetic construct
  misc_feature 1..21: note = Synthetic
  source 1..21: mol_type = other DNA
tcatgtccctggccagcagca

SEQ ID NO: 14587 - DNA, 21 bp, synthetic construct
  misc_feature 1..21: note = Synthetic
  source 1..21: mol_type = other DNA
tcatgtccttgcagtcatatt

SEQ ID NO: 14588 - DNA, 21 bp, synthetic construct
  misc_feature 1..21: note = Synthetic
  source 1..21: mol_type = other DNA
tcattctcccaaaaagcgttg

SEQ ID NO: 14589 - DNA, 21 bp, synthetic construct
  misc_feature 1..21: note = Synthetic
  source 1..21: mol_type = other DNA
tcattctctgggacaggtcag

SEQ ID NO: 14590 - DNA, 21 bp, synthetic construct
  misc_feature 1..21: note = Synthetic
  source 1..21: mol_type = other DNA
tcattgacacgggctttccct

SEQ ID NO: 14591 - DNA, 21 bp, synthetic construct
  misc_feature 1..21: note = Synthetic
  source 1..21: mol_type = other DNA
tcattgcagacgtgggaacag

SEQ ID NO: 14592 - DNA, 21 bp, synthetic construct
  misc_feature 1..21: note = Synthetic
  source 1..21: mol_type = other DNA
tcatttaagaaatttaattga

SEQ ID NO: 14593 - DNA, 21 bp, synthetic construct
  misc_feature 1..21: note = Synthetic
  source 1..21: mol_type = other DNA
tcatttccgacgccatgaatc

SEQ ID NO: 14594 - DNA, 21 bp, synthetic construct
  misc_feature 1..21: note = Synthetic
  source 1..21: mol_type = other DNA
tcatttcctctgccagcaacg

SEQ ID NO: 14595 - DNA, 21 bp, synthetic construct
  misc_feature 1..21: note = Synthetic
  source 1..21: mol_type = other DNA
tcatttggtgaatgagtttgg

SEQ ID NO: 14596 - DNA, 21 bp, synthetic construct
  misc_feature 1..21: note = Synthetic
  source 1..21: mol_type = other DNA
tcattttttaagagatggggt

SEQ ID NO: 14597 - DNA, 21 bp, synthetic construct
  misc_feature 1..21: note = Synthetic
  source 1..21: mol_type = other DNA
tccaaaatactttgtcctcaa

SEQ ID NO: 14598 - DNA, 21 bp, synthetic construct
  misc_feature 1..21: note = Synthetic
  source 1..21: mol_type = other DNA
tccaactcctgaactcaagtg

SEQ ID NO: 14599 - DNA, 21 bp, synthetic construct
  misc_feature 1..21: note = Synthetic
  source 1..21: mol_type = other DNA
tccaagatggtcttccggttg

SEQ ID NO: 14600 - DNA, 21 bp, synthetic construct
  misc_feature 1..21: note = Synthetic
  source 1..21: mol_type = other DNA
tccaagcagtcccggtctgag

SEQ ID NO: 14601 - DNA, 21 bp, synthetic construct
  misc_feature 1..21: note = Synthetic
  source 1..21: mol_type = other DNA
tccaagcattcgttggtcccg

SEQ ID NO: 14602 - DNA, 21 bp, synthetic construct
  misc_feature 1..21: note = Synthetic
  source 1..21: mol_type = other DNA
tccacaccattcaggccccct

SEQ ID NO: 14603 - DNA, 21 bp, synthetic construct
  misc_feature 1..21: note = Synthetic
  source 1..21: mol_type = other DNA
tccacagccagcccgtcgggg

SEQ ID NO: 14604 - DNA, 21 bp, synthetic construct
  misc_feature 1..21: note = Synthetic
  source 1..21: mol_type = other DNA
tccaccacgatggcccttggc

SEQ ID NO: 14605 - DNA, 21 bp, synthetic construct
  misc_feature 1..21: note = Synthetic
  source 1..21: mol_type = other DNA
tccacccgcctcggcctccca

SEQ ID NO: 14606 - DNA, 21 bp, synthetic construct
  misc_feature 1..21: note = Synthetic
  source 1..21: mol_type = other DNA
tccaccgtggtgagcccaggg

SEQ ID NO: 14607 - DNA, 21 bp, synthetic construct
  misc_feature 1..21: note = Synthetic
  source 1..21: mol_type = other DNA
tccacctcctgggctcaggcg

SEQ ID NO: 14608 - DNA, 21 bp, synthetic construct
  misc_feature 1..21: note = Synthetic
  source 1..21: mol_type = other DNA
tccacttggccatcgcacctc

SEQ ID NO: 14609 - DNA, 21 bp, synthetic construct
  misc_feature 1..21: note = Synthetic
  source 1..21: mol_type = other DNA
tccagaactgaggaatgcagc

SEQ ID NO: 14610 - DNA, 21 bp, synthetic construct
  misc_feature 1..21: note = Synthetic
  source 1..21: mol_type = other DNA
tccagactgaccatcgagggg

SEQ ID NO: 14611 - DNA, 21 bp, synthetic construct
  misc_feature 1..21: note = Synthetic
  source 1..21: mol_type = other DNA
tccagactgaccatctgtctc

SEQ ID NO: 14612 - DNA, 21 bp, synthetic construct
  misc_feature 1..21: note = Synthetic
  source 1..21: mol_type = other DNA
tccagactggaggatttattt

SEQ ID NO: 14613 - DNA, 21 bp, synthetic construct
  misc_feature 1..21: note = Synthetic
  source 1..21: mol_type = other DNA
tccagagcgaccacgttcctc

SEQ ID NO: 14614 - DNA, 21 bp, synthetic construct
  misc_feature 1..21: note = Synthetic
  source 1..21: mol_type = other DNA
tccagccccagggccccatgc

SEQ ID NO: 14615 - DNA, 21 bp, synthetic construct
  misc_feature 1..21: note = Synthetic
  source 1..21: mol_type = other DNA
tccagcgcaatttccagcccc

SEQ ID NO: 14616 - DNA, 21 bp, synthetic construct
  misc_feature 1..21: note = Synthetic
  source 1..21: mol_type = other DNA
tccagcgtcatcttcctgacc

SEQ ID NO: 14617 - DNA, 21 bp, synthetic construct
  misc_feature 1..21: note = Synthetic
  source 1..21: mol_type = other DNA
tccagctcagcctcccaaagt

SEQ ID NO: 14618 - DNA, 21 bp, synthetic construct
  misc_feature 1..21: note = Synthetic
  source 1..21: mol_type = other DNA
tccagctggaagccttcctca

SEQ ID NO: 14619 - DNA, 21 bp, synthetic construct
  misc_feature 1..21: note = Synthetic
  source 1..21: mol_type = other DNA
tccaggcagatgttcacgcca

SEQ ID NO: 14620 - DNA, 21 bp, synthetic construct
  misc_feature 1..21: note = Synthetic
  source 1..21: mol_type = other DNA
tccagggtgatgcattcgccg

SEQ ID NO: 14621 - DNA, 21 bp, synthetic construct
  misc_feature 1..21: note = Synthetic
  source 1..21: mol_type = other DNA
tccaggttcacgcagagctgg

SEQ ID NO: 14622 - DNA, 21 bp, synthetic construct
  misc_feature 1..21: note = Synthetic
  source 1..21: mol_type = other DNA
tccagtacatgaagccatgaa

SEQ ID NO: 14623 - DNA, 21 bp, synthetic construct
  misc_feature 1..21: note = Synthetic
  source 1..21: mol_type = other DNA
tccagtagatgttgctgtgga

SEQ ID NO: 14624 - DNA, 21 bp, synthetic construct
  misc_feature 1..21: note = Synthetic
  source 1..21: mol_type = other DNA
tccagtccacagccagcccgt

SEQ ID NO: 14625 - DNA, 21 bp, synthetic construct
  misc_feature 1..21: note = Synthetic
  source 1..21: mol_type = other DNA
tccagttcgtgcaaataatct

SEQ ID NO: 14626 - DNA, 21 bp, synthetic construct
  misc_feature 1..21: note = Synthetic
  source 1..21: mol_type = other DNA
tccatagaaggaagaccccca

SEQ ID NO: 14627 - DNA, 21 bp, synthetic construct
  misc_feature 1..21: note = Synthetic
  source 1..21: mol_type = other DNA
tccatcagagcactggaattc

SEQ ID NO: 14628 - DNA, 21 bp, synthetic construct
  misc_feature 1..21: note = Synthetic
  source 1..21: mol_type = other DNA
tccatgtttgaggattgtgtc

SEQ ID NO: 14629 - DNA, 21 bp, synthetic construct
  misc_feature 1..21: note = Synthetic
  source 1..21: mol_type = other DNA
tcccaaaaagcgttgcacaca

SEQ ID NO: 14630 - DNA, 21 bp, synthetic construct
  misc_feature 1..21: note = Synthetic
  source 1..21: mol_type = other DNA
tcccaaagtgctgggattaca

SEQ ID NO: 14631 - DNA, 21 bp, synthetic construct
  misc_feature 1..21: note = Synthetic
  source 1..21: mol_type = other DNA
tcccaacacacacgacagaaa

SEQ ID NO: 14632 - DNA, 21 bp, synthetic construct
  misc_feature 1..21: note = Synthetic
  source 1..21: mol_type = other DNA
tcccaacccaagccattgcat

SEQ ID NO: 14633 - DNA, 21 bp, synthetic construct
  misc_feature 1..21: note = Synthetic
  source 1..21: mol_type = other DNA
tcccaagtagctgggatcaca

SEQ ID NO: 14634 - DNA, 21 bp, synthetic construct
  misc_feature 1..21: note = Synthetic
  source 1..21: mol_type = other DNA
tcccacctcagcctcgccatg

SEQ ID NO: 14635 - DNA, 21 bp, synthetic construct
  misc_feature 1..21: note = Synthetic
  source 1..21: mol_type = other DNA
tcccagaagccactcatacat

SEQ ID NO: 14636 - DNA, 21 bp, synthetic construct
  misc_feature 1..21: note = Synthetic
  source 1..21: mol_type = other DNA
tcccagatgaataaatatata

SEQ ID NO: 14637 - DNA, 21 bp, synthetic construct
  misc_feature 1..21: note = Synthetic
  source 1..21: mol_type = other DNA
tcccatcccaacacacacgac

SEQ ID NO: 14638 - DNA, 21 bp, synthetic construct
  misc_feature 1..21: note = Synthetic
  source 1..21: mol_type = other DNA
tcccatcgtggcagcgaaact

SEQ ID NO: 14639 - DNA, 21 bp, synthetic construct
  misc_feature 1..21: note = Synthetic
  source 1..21: mol_type = other DNA
tccccactatctgtacaggga

SEQ ID NO: 14640 - DNA, 21 bp, synthetic construct
  misc_feature 1..21: note = Synthetic
  source 1..21: mol_type = other DNA
tccccagtcagtccagtacat

SEQ ID NO: 14641 - DNA, 21 bp, synthetic construct
  misc_feature 1..21: note = Synthetic
  source 1..21: mol_type = other DNA
tccccccgggcctgtttctct

SEQ ID NO: 14642 - DNA, 21 bp, synthetic construct
  misc_feature 1..21: note = Synthetic
  source 1..21: mol_type = other DNA
tccccgccgcggcgaggagca

SEQ ID NO: 14643 - DNA, 21 bp, synthetic construct
  misc_feature 1..21: note = Synthetic
  source 1..21: mol_type = other DNA
tccccggatttgcaggtgaca

SEQ ID NO: 14644 - DNA, 21 bp, synthetic construct
  misc_feature 1..21: note = Synthetic
  source 1..21: mol_type = other DNA
tccccggcattcattgacacg

SEQ ID NO: 14645 - DNA, 21 bp, synthetic construct
  misc_feature 1..21: note = Synthetic
  source 1..21: mol_type = other DNA
tcccctcccctttcatcttcc

SEQ ID NO: 14646 - DNA, 21 bp, synthetic construct
  misc_feature 1..21: note = Synthetic
  source 1..21: mol_type = other DNA
tccccttggaacacgtaaaga

SEQ ID NO: 14647 - DNA, 21 bp, synthetic construct
  misc_feature 1..21: note = Synthetic
  source 1..21: mol_type = other DNA
tcccctttcatcttccatgtt

SEQ ID NO: 14648 - DNA, 21 bp, synthetic construct
  misc_feature 1..21: note = Synthetic
  source 1..21: mol_type = other DNA
tcccgacccggatcacgacct

SEQ ID NO: 14649 - DNA, 21 bp, synthetic construct
  misc_feature 1..21: note = Synthetic
  source 1..21: mol_type = other DNA
tcccgagtagctgggactaca

SEQ ID NO: 14650 - DNA, 21 bp, synthetic construct
  misc_feature 1..21: note = Synthetic
  source 1..21: mol_type = other DNA
tcccgcactctttgatgggtt

SEQ ID NO: 14651 - DNA, 21 bp, synthetic construct
  misc_feature 1..21: note = Synthetic
  source 1..21: mol_type = other DNA
tcccggcagtctctagccatg

SEQ ID NO: 14652 - DNA, 21 bp, synthetic construct
  misc_feature 1..21: note = Synthetic
  source 1..21: mol_type = other DNA
tcccgggttcacaccattctc

SEQ ID NO: 14653 - DNA, 21 bp, synthetic construct
  misc_feature 1..21: note = Synthetic
  source 1..21: mol_type = other DNA
tcccggtcaacctgcccctct

SEQ ID NO: 14654 - DNA, 21 bp, synthetic construct
  misc_feature 1..21: note = Synthetic
  source 1..21: mol_type = other DNA
tcccggtcacactgccggctg

SEQ ID NO: 14655 - DNA, 21 bp, synthetic construct
  misc_feature 1..21: note = Synthetic
  source 1..21: mol_type = other DNA
tcccggtctgagtcacagacg

SEQ ID NO: 14656 - DNA, 21 bp, synthetic construct
  misc_feature 1..21: note = Synthetic
  source 1..21: mol_type = other DNA
tcccgtcaaacgatccagact

SEQ ID NO: 14657 - DNA, 21 bp, synthetic construct
  misc_feature 1..21: note = Synthetic
  source 1..21: mol_type = other DNA
tcccgtcttggcactggaact

SEQ ID NO: 14658 - DNA, 21 bp, synthetic construct
  misc_feature 1..21: note = Synthetic
  source 1..21: mol_type = other DNA
tcccgttggtgccatctgctg

SEQ ID NO: 14659 - DNA, 21 bp, synthetic construct
  misc_feature 1..21: note = Synthetic
  source 1..21: mol_type = other DNA
tccctcgcagagtgtcacatt

SEQ ID NO: 14660 - DNA, 21 bp, synthetic construct
  misc_feature 1..21: note = Synthetic
  source 1..21: mol_type = other DNA
tccctcgcagagtgtcagaca

SEQ ID NO: 14661 - DNA, 21 bp, synthetic construct
  misc_feature 1..21: note = Synthetic
  source 1..21: mol_type = other DNA
tccctgaataacgttttcctc

SEQ ID NO: 14662 - DNA, 21 bp, synthetic construct
  misc_feature 1..21: note = Synthetic
  source 1..21: mol_type = other DNA
tccctgcactgggggggacac

SEQ ID NO: 14663 - DNA, 21 bp, synthetic construct
  misc_feature 1..21: note = Synthetic
  source 1..21: mol_type = other DNA
tccctggccagcagcatgccg

SEQ ID NO: 14664 - DNA, 21 bp, synthetic construct
  misc_feature 1..21: note = Synthetic
  source 1..21: mol_type = other DNA
tccctggcctgggatcccatc

SEQ ID NO: 14665 - DNA, 21 bp, synthetic construct
  misc_feature 1..21: note = Synthetic
  source 1..21: mol_type = other DNA
tccctggggacaattgccaat

SEQ ID NO: 14666 - DNA, 21 bp, synthetic construct
  misc_feature 1..21: note = Synthetic
  source 1..21: mol_type = other DNA
tcccttgtgacatcttcacgc

SEQ ID NO: 14667 - DNA, 21 bp, synthetic construct
  misc_feature 1..21: note = Synthetic
  source 1..21: mol_type = other DNA
tccctttcctggcttaaggaa

SEQ ID NO: 14668 - DNA, 21 bp, synthetic construct
  misc_feature 1..21: note = Synthetic
  source 1..21: mol_type = other DNA
tccgaaaccagaaaggcttat

SEQ ID NO: 14669 - DNA, 21 bp, synthetic construct
  misc_feature 1..21: note = Synthetic
  source 1..21: mol_type = other DNA
tccgaagcctgttctgcctcc

SEQ ID NO: 14670 - DNA, 21 bp, synthetic construct
  misc_feature 1..21: note = Synthetic
  source 1..21: mol_type = other DNA
tccgacgccatgaatcccttt

SEQ ID NO: 14671 - DNA, 21 bp, synthetic construct
  misc_feature 1..21: note = Synthetic
  source 1..21: mol_type = other DNA
tccgagccatcttcgcagtcg

SEQ ID NO: 14672 - DNA, 21 bp, synthetic construct
  misc_feature 1..21: note = Synthetic
  source 1..21: mol_type = other DNA
tccgcaacagagacagtgccc

SEQ ID NO: 14673 - DNA, 21 bp, synthetic construct
  misc_feature 1..21: note = Synthetic
  source 1..21: mol_type = other DNA
tccgcttcccgggttcacacc

SEQ ID NO: 14674 - DNA, 21 bp, synthetic construct
  misc_feature 1..21: note = Synthetic
  source 1..21: mol_type = other DNA
tccggacatcagtgcaacagt

SEQ ID NO: 14675 - DNA, 21 bp, synthetic construct
  misc_feature 1..21: note = Synthetic
  source 1..21: mol_type = other DNA
tccgggcaggcgcaggtaaac

SEQ ID NO: 14676 - DNA, 21 bp, synthetic construct
  misc_feature 1..21: note = Synthetic
  source 1..21: mol_type = other DNA
tccggggacccgggacttgtc

SEQ ID NO: 14677 - DNA, 21 bp, synthetic construct
  misc_feature 1..21: note = Synthetic
  source 1..21: mol_type = other DNA
tccggtccagcgtcatcttcc

SEQ ID NO: 14678 - DNA, 21 bp, synthetic construct
  misc_feature 1..21: note = Synthetic
  source 1..21: mol_type = other DNA
tccggttgcccccgttgacat

SEQ ID NO: 14679 - DNA, 21 bp, synthetic construct
  misc_feature 1..21: note = Synthetic
  source 1..21: mol_type = other DNA
tccgtggcgatggggaggaca

SEQ ID NO: 14680 - DNA, 21 bp, synthetic construct
  misc_feature 1..21: note = Synthetic
  source 1..21: mol_type = other DNA
tccgtgtccagagcgaccacg

SEQ ID NO: 14681 - DNA, 21 bp, synthetic construct
  misc_feature 1..21: note = Synthetic
  source 1..21: mol_type = other DNA
tcctagctggaaaccctggct

SEQ ID NO: 14682 - DNA, 21 bp, synthetic construct
  misc_feature 1..21: note = Synthetic
  source 1..21: mol_type = other DNA
tcctcaaagacggccaaggag

SEQ ID NO: 14683 - DNA, 21 bp, synthetic construct
  misc_feature 1..21: note = Synthetic
  source 1..21: mol_type = other DNA
tcctcacactggcacttgtag

SEQ ID NO: 14684 - DNA, 21 bp, synthetic construct
  misc_feature 1..21: note = Synthetic
  source 1..21: mol_type = other DNA
tcctcacggccaaggtaaccg

SEQ ID NO: 14685 - DNA, 21 bp, synthetic construct
  misc_feature 1..21: note = Synthetic
  source 1..21: mol_type = other DNA
tcctcaggttggggatgaggc

SEQ ID NO: 14686 - DNA, 21 bp, synthetic construct
  misc_feature 1..21: note = Synthetic
  source 1..21: mol_type = other DNA
tcctcatgtccctggccagca

SEQ ID NO: 14687 - DNA, 21 bp, synthetic construct
  misc_feature 1..21: note = Synthetic
  source 1..21: mol_type = other DNA
tcctccaagatggtcttccgg

SEQ ID NO: 14688 - DNA, 21 bp, synthetic construct
  misc_feature 1..21: note = Synthetic
  source 1..21: mol_type = other DNA
tcctccagactgaccatcgag

SEQ ID NO: 14689 - DNA, 21 bp, synthetic construct
  misc_feature 1..21: note = Synthetic
  source 1..21: mol_type = other DNA
tcctccagactgaccatctgt

SEQ ID NO: 14690 - DNA, 21 bp, synthetic construct
  misc_feature 1..21: note = Synthetic
  source 1..21: mol_type = other DNA
tcctcccacctcagcctcgcc

SEQ ID NO: 14691 - DNA, 21 bp, synthetic construct
  misc_feature 1..21: note = Synthetic
  source 1..21: mol_type = other DNA
tcctcctgcctcagcctccca

SEQ ID NO: 14692 - DNA, 21 bp, synthetic construct
  misc_feature 1..21: note = Synthetic
  source 1..21: mol_type = other DNA
tcctcgtcagatttgtccttg

SEQ ID NO: 14693 - DNA, 21 bp, synthetic construct
  misc_feature 1..21: note = Synthetic
  source 1..21: mol_type = other DNA
tcctctcacaccagttcactc

SEQ ID NO: 14694 - DNA, 21 bp, synthetic construct
  misc_feature 1..21: note = Synthetic
  source 1..21: mol_type = other DNA
tcctctgccagcaacgtcgcc

SEQ ID NO: 14695 - DNA, 21 bp, synthetic construct
  misc_feature 1..21: note = Synthetic
  source 1..21: mol_type = other DNA
tcctctggggacagtaggttt

SEQ ID NO: 14696 - DNA, 21 bp, synthetic construct
  misc_feature 1..21: note = Synthetic
  source 1..21: mol_type = other DNA
tcctctgtggtcttctgatag

SEQ ID NO: 14697 - DNA, 21 bp, synthetic construct
  misc_feature 1..21: note = Synthetic
  source 1..21: mol_type = other DNA
tcctcttcacgcccttggtat

SEQ ID NO: 14698 - DNA, 21 bp, synthetic construct
  misc_feature 1..21: note = Synthetic
  source 1..21: mol_type = other DNA
tcctcttggctgggtgaggtt

SEQ ID NO: 14699 - DNA, 21 bp, synthetic construct
  misc_feature 1..21: note = Synthetic
  source 1..21: mol_type = other DNA
tcctgaactcaagtgatccag

SEQ ID NO: 14700 - DNA, 21 bp, synthetic construct
  misc_feature 1..21: note = Synthetic
  source 1..21: mol_type = other DNA
tcctgacactcatcgatatcg

SEQ ID NO: 14701 - DNA, 21 bp, synthetic construct
  misc_feature 1..21: note = Synthetic
  source 1..21: mol_type = other DNA
tcctgacactcatcgatatct

SEQ ID NO: 14702 - DNA, 21 bp, synthetic construct
  misc_feature 1..21: note = Synthetic
  source 1..21: mol_type = other DNA
tcctgacagccacacctgggt

SEQ ID NO: 14703 - DNA, 21 bp, synthetic construct
  misc_feature 1..21: note = Synthetic
  source 1..21: mol_type = other DNA
tcctgacctcatgatccaccc

SEQ ID NO: 14704 - DNA, 21 bp, synthetic construct
  misc_feature 1..21: note = Synthetic
  source 1..21: mol_type = other DNA
tcctgacctcgtgccggttgg

SEQ ID NO: 14705 - DNA, 21 bp, synthetic construct
  misc_feature 1..21: note = Synthetic
  source 1..21: mol_type = other DNA
tcctgagtttaggggtttggc

SEQ ID NO: 14706 - DNA, 21 bp, synthetic construct
  misc_feature 1..21: note = Synthetic
  source 1..21: mol_type = other DNA
tcctgcctcagcctcccaagt

SEQ ID NO: 14707 - DNA, 21 bp, synthetic construct
  misc_feature 1..21: note = Synthetic
  source 1..21: mol_type = other DNA
tcctgcctcagcctcccgagt

SEQ ID NO: 14708 - DNA, 21 bp, synthetic construct
  misc_feature 1..21: note = Synthetic
  source 1..21: mol_type = other DNA
tcctggagagaaatggaggtg

SEQ ID NO: 14709 - DNA, 21 bp, synthetic construct
  misc_feature 1..21: note = Synthetic
  source 1..21: mol_type = other DNA
tcctggcactcagcgctgcca

SEQ ID NO: 14710 - DNA, 21 bp, synthetic construct
  misc_feature 1..21: note = Synthetic
  source 1..21: mol_type = other DNA
tcctggcttaaggaaggtaca

SEQ ID NO: 14711 - DNA, 21 bp, synthetic construct
  misc_feature 1..21: note = Synthetic
  source 1..21: mol_type = other DNA
tcctgggactcatcagagcca

SEQ ID NO: 14712 - DNA, 21 bp, synthetic construct
  misc_feature 1..21: note = Synthetic
  source 1..21: mol_type = other DNA
tcctgggagcacgtcttgggg

SEQ ID NO: 14713 - DNA, 21 bp, synthetic construct
  misc_feature 1..21: note = Synthetic
  source 1..21: mol_type = other DNA
tcctgggctcaggcgatcctc

SEQ ID NO: 14714 - DNA, 21 bp, synthetic construct
  misc_feature 1..21: note = Synthetic
  source 1..21: mol_type = other DNA
tcctgggtggccactgcagcc

SEQ ID NO: 14715 - DNA, 21 bp, synthetic construct
  misc_feature 1..21: note = Synthetic
  source 1..21: mol_type = other DNA
tcctggtccccccgggcctgt

SEQ ID NO: 14716 - DNA, 21 bp, synthetic construct
  misc_feature 1..21: note = Synthetic
  source 1..21: mol_type = other DNA
tcctggttgtggcaaatgtgg

SEQ ID NO: 14717 - DNA, 21 bp, synthetic construct
  misc_feature 1..21: note = Synthetic
  source 1..21: mol_type = other DNA
tccttacggctgtggagctga

SEQ ID NO: 14718 - DNA, 21 bp, synthetic construct
  misc_feature 1..21: note = Synthetic
  source 1..21: mol_type = other DNA
tccttcacgaggaaaggaaga

SEQ ID NO: 14719 - DNA, 21 bp, synthetic construct
  misc_feature 1..21: note = Synthetic
  source 1..21: mol_type = other DNA
tccttgcagtcatattcccgg

SEQ ID NO: 14720 - DNA, 21 bp, synthetic construct
  misc_feature 1..21: note = Synthetic
  source 1..21: mol_type = other DNA
tccttgcagtcggggccacca

SEQ ID NO: 14721 - DNA, 21 bp, synthetic construct
  misc_feature 1..21: note = Synthetic
  source 1..21: mol_type = other DNA
tcgaaagacactgggtgggtc

SEQ ID NO: 14722 - DNA, 21 bp, synthetic construct
  misc_feature 1..21: note = Synthetic
  source 1..21: mol_type = other DNA
tcgaaggccgagcaggggcta

SEQ ID NO: 14723 - DNA, 21 bp, synthetic construct
  misc_feature 1..21: note = Synthetic
  source 1..21: mol_type = other DNA
tcgaggggtagctgtagccgt

SEQ ID NO: 14724 - DNA, 21 bp, synthetic construct
  misc_feature 1..21: note = Synthetic
  source 1..21: mol_type = other DNA
tcgatatcgcactctttgatg

SEQ ID NO: 14725 - DNA, 21 bp, synthetic construct
  misc_feature 1..21: note = Synthetic
  source 1..21: mol_type = other DNA
tcgatatcttcgcatcttcgc

SEQ ID NO: 14726 - DNA, 21 bp, synthetic construct
  misc_feature 1..21: note = Synthetic
  source 1..21: mol_type = other DNA
tcgatattcacgatcacggct

SEQ ID NO: 14727 - DNA, 21 bp, synthetic construct
  misc_feature 1..21: note = Synthetic
  source 1..21: mol_type = other DNA
tcgatcatggctcactgcaac

SEQ ID NO: 14728 - DNA, 21 bp, synthetic construct
  misc_feature 1..21: note = Synthetic
  source 1..21: mol_type = other DNA
tcgatctcctgacctcatgat

SEQ ID NO: 14729 - DNA, 21 bp, synthetic construct
  misc_feature 1..21: note = Synthetic
  source 1..21: mol_type = other DNA
tcgatgcttgagatggagtga

SEQ ID NO: 14730 - DNA, 21 bp, synthetic construct
  misc_feature 1..21: note = Synthetic
  source 1..21: mol_type = other DNA
tcgcacctccagaactgagga

SEQ ID NO: 14731 - DNA, 21 bp, synthetic construct
  misc_feature 1..21: note = Synthetic
  source 1..21: mol_type = other DNA
tcgcactctttgatgggttca

SEQ ID NO: 14732 - DNA, 21 bp, synthetic construct
  misc_feature 1..21: note = Synthetic
  source 1..21: mol_type = other DNA
tcgcagacccacttgtaggag

SEQ ID NO: 14733 - DNA, 21 bp, synthetic construct
  misc_feature 1..21: note = Synthetic
  source 1..21: mol_type = other DNA
tcgcagagtgtcacattaacg

SEQ ID NO: 14734 - DNA, 21 bp, synthetic construct
  misc_feature 1..21: note = Synthetic
  source 1..21: mol_type = other DNA
tcgcagagtgtcagacagcct

SEQ ID NO: 14735 - DNA, 21 bp, synthetic construct
  misc_feature 1..21: note = Synthetic
  source 1..21: mol_type = other DNA
tcgcagcctctgccaggcagt

SEQ ID NO: 14736 - DNA, 21 bp, synthetic construct
  misc_feature 1..21: note = Synthetic
  source 1..21: mol_type = other DNA
tcgcaggcccacagctggggg

SEQ ID NO: 14737 - DNA, 21 bp, synthetic construct
  misc_feature 1..21: note = Synthetic
  source 1..21: mol_type = other DNA
tcgcagtccacttggccatcg

SEQ ID NO: 14738 - DNA, 21 bp, synthetic construct
  misc_feature 1..21: note = Synthetic
  source 1..21: mol_type = other DNA
tcgcagtcggggtcgttgtcg

SEQ ID NO: 14739 - DNA, 21 bp, synthetic construct
  misc_feature 1..21: note = Synthetic
  source 1..21: mol_type = other DNA
tcgcatctgtcgcccacgtgg

SEQ ID NO: 14740 - DNA, 21 bp, synthetic construct
  misc_feature 1..21: note = Synthetic
  source 1..21: mol_type = other DNA
tcgcatctgtcgcccactgca

SEQ ID NO: 14741 - DNA, 21 bp, synthetic construct
  misc_feature 1..21: note = Synthetic
  source 1..21: mol_type = other DNA
tcgcatcttcgctgggccacc

SEQ ID NO: 14742 - DNA, 21 bp, synthetic construct
  misc_feature 1..21: note = Synthetic
  source 1..21: mol_type = other DNA
tcgccacagagcacagcggaa

SEQ ID NO: 14743 - DNA, 21 bp, synthetic construct
  misc_feature 1..21: note = Synthetic
  source 1..21: mol_type = other DNA
tcgccacttaggcagtggaac

SEQ ID NO: 14744 - DNA, 21 bp, synthetic construct
  misc_feature 1..21: note = Synthetic
  source 1..21: mol_type = other DNA
tcgccaggagggcccaggata

SEQ ID NO: 14745 - DNA, 21 bp, synthetic construct
  misc_feature 1..21: note = Synthetic
  source 1..21: mol_type = other DNA
tcgccatgcctggccagaggc

SEQ ID NO: 14746 - DNA, 21 bp, synthetic construct
  misc_feature 1..21: note = Synthetic
  source 1..21: mol_type = other DNA
tcgcccacgtggctgaagatc

SEQ ID NO: 14747 - DNA, 21 bp, synthetic construct
  misc_feature 1..21: note = Synthetic
  source 1..21: mol_type = other DNA
tcgcccactgcagtccccgcc

SEQ ID NO: 14748 - DNA, 21 bp, synthetic construct
  misc_feature 1..21: note = Synthetic
  source 1..21: mol_type = other DNA
tcgcccagagcttggtgagac

SEQ ID NO: 14749 - DNA, 21 bp, synthetic construct
  misc_feature 1..21: note = Synthetic
  source 1..21: mol_type = other DNA
tcgcccaggccagactgcgga

SEQ ID NO: 14750 - DNA, 21 bp, synthetic construct
  misc_feature 1..21: note = Synthetic
  source 1..21: mol_type = other DNA
tcgccgctgtgacacttgaac

SEQ ID NO: 14751 - DNA, 21 bp, synthetic construct
  misc_feature 1..21: note = Synthetic
  source 1..21: mol_type = other DNA
tcgcctttgtgacaggaaccg

SEQ ID NO: 14752 - DNA, 21 bp, synthetic construct
  misc_feature 1..21: note = Synthetic
  source 1..21: mol_type = other DNA
tcgcggaggcggctccgggga

SEQ ID NO: 14753 - DNA, 21 bp, synthetic construct
  misc_feature 1..21: note = Synthetic
  source 1..21: mol_type = other DNA
tcgctcatgtccttgcagtca

SEQ ID NO: 14754 - DNA, 21 bp, synthetic construct
  misc_feature 1..21: note = Synthetic
  source 1..21: mol_type = other DNA
tcgctccggtccagcgtcatc

SEQ ID NO: 14755 - DNA, 21 bp, synthetic construct
  misc_feature 1..21: note = Synthetic
  source 1..21: mol_type = other DNA
tcgctctgtcgcccaggccag

SEQ ID NO: 14756 - DNA, 21 bp, synthetic construct
  misc_feature 1..21: note = Synthetic
  source 1..21: mol_type = other DNA
tcgctgggccaccagctggaa

SEQ ID NO: 14757 - DNA, 21 bp, synthetic construct
  misc_feature 1..21: note = Synthetic
  source 1..21: mol_type = other DNA
tcgctttgttgctcaggcctg

SEQ ID NO: 14758 - DNA, 21 bp, synthetic construct
  misc_feature 1..21: note = Synthetic
  source 1..21: mol_type = other DNA
tcggaacctgtgaggcggttg

SEQ ID NO: 14759 - DNA, 21 bp, synthetic construct
  misc_feature 1..21: note = Synthetic
  source 1..21: mol_type = other DNA
tcggcctcccaaagtgctggg

SEQ ID NO: 14760 - DNA, 21 bp, synthetic construct
  misc_feature 1..21: note = Synthetic
  source 1..21: mol_type = other DNA
tcggctcactgcaagctccgc

SEQ ID NO: 14761 - DNA, 21 bp, synthetic construct
  misc_feature 1..21: note = Synthetic
  source 1..21: mol_type = other DNA
tcggctgcagaccaaggaggg

SEQ ID NO: 14762 - DNA, 21 bp, synthetic construct
  misc_feature 1..21: note = Synthetic
  source 1..21: mol_type = other DNA
tcgggaacaggtcgggtggtt

SEQ ID NO: 14763 - DNA, 21 bp, synthetic construct
  misc_feature 1..21: note = Synthetic
  source 1..21: mol_type = other DNA
tcgggaggatgggcaccaggc

SEQ ID NO: 14764 - DNA, 21 bp, synthetic construct
  misc_feature 1..21: note = Synthetic
  source 1..21: mol_type = other DNA
tcgggatcctgacactcatcg

SEQ ID NO: 14765 - DNA, 21 bp, synthetic construct
  misc_feature 1..21: note = Synthetic
  source 1..21: mol_type = other DNA
tcggggcacaggcactcgtag

SEQ ID NO: 14766 - DNA, 21 bp, synthetic construct
  misc_feature 1..21: note = Synthetic
  source 1..21: mol_type = other DNA
tcggggccaccatcacagcgc

SEQ ID NO: 14767 - DNA, 21 bp, synthetic construct
  misc_feature 1..21: note = Synthetic
  source 1..21: mol_type = other DNA
tcggggctggtggggcgaggg

SEQ ID NO: 14768 - DNA, 21 bp, synthetic construct
  misc_feature 1..21: note = Synthetic
  source 1..21: mol_type = other DNA
tcgggggcctggatgtctctg

SEQ ID NO: 14769 - DNA, 21 bp, synthetic construct
  misc_feature 1..21: note = Synthetic
  source 1..21: mol_type = other DNA
tcgggggtgacagggcaaagg

SEQ ID NO: 14770 - DNA, 21 bp, synthetic construct
  misc_feature 1..21: note = Synthetic
  source 1..21: mol_type = other DNA
tcggggtcgttgtcgcaggcc

SEQ ID NO: 14771 - DNA, 21 bp, synthetic construct
  misc_feature 1..21: note = Synthetic
  source 1..21: mol_type = other DNA
tcgggtggttgtgtgctgtgt

SEQ ID NO: 14772 - DNA, 21 bp, synthetic construct
  misc_feature 1..21: note = Synthetic
  source 1..21: mol_type = other DNA
tcggtccagtagatgttgctg

SEQ ID NO: 14773 - DNA, 21 bp, synthetic construct
  misc_feature 1..21: note = Synthetic
  source 1..21: mol_type = other DNA
tcggtgccaccacggattcag

SEQ ID NO: 14774 - DNA, 21 bp, synthetic construct
  misc_feature 1..21: note = Synthetic
  source 1..21: mol_type = other DNA
tcgtaaggaaccgaggccttg

SEQ ID NO: 14775 - DNA, 21 bp, synthetic construct
  misc_feature 1..21: note = Synthetic
  source 1..21: mol_type = other DNA
tcgtagccgatcttaaggtca

SEQ ID NO: 14776 - DNA, 21 bp, synthetic construct
  misc_feature 1..21: note = Synthetic
  source 1..21: mol_type = other DNA
tcgtcagatttgtccttgcag

SEQ ID NO: 14777 - DNA, 21 bp, synthetic construct
  misc_feature 1..21: note = Synthetic
  source 1..21: mol_type = other DNA
tcgtcagggcgacaggtggcc

SEQ ID NO: 14778 - DNA, 21 bp, synthetic construct
  misc_feature 1..21: note = Synthetic
  source 1..21: mol_type = other DNA
tcgtcctgggagcacgtcttg

SEQ ID NO: 14779 - DNA, 21 bp, synthetic construct
  misc_feature 1..21: note = Synthetic
  source 1..21: mol_type = other DNA
tcgtcgcctttgtgacaggaa

SEQ ID NO: 14780 - DNA, 21 bp, synthetic construct
  misc_feature 1..21: note = Synthetic
  source 1..21: mol_type = other DNA
tcgtctgagccgtccaagcag

SEQ ID NO: 14781 - DNA, 21 bp, synthetic construct
  misc_feature 1..21: note = Synthetic
  source 1..21: mol_type = other DNA
tcgtctgagccgttgtcgcag

SEQ ID NO: 14782 - DNA, 21 bp, synthetic construct
  misc_feature 1..21: note = Synthetic
  source 1..21: mol_type = other DNA
tcgtgcaaataatctttgtac

SEQ ID NO: 14783 - DNA, 21 bp, synthetic construct
  misc_feature 1..21: note = Synthetic
  source 1..21: mol_type = other DNA
tcgtgccggttggtgaagaag

SEQ ID NO: 14784 - DNA, 21 bp, synthetic construct
  misc_feature 1..21: note = Synthetic
  source 1..21: mol_type = other DNA
tcgtggcagcgaaactcgtcc

SEQ ID NO: 14785 - DNA, 21 bp, synthetic construct
  misc_feature 1..21: note = Synthetic
  source 1..21: mol_type = other DNA
tcgtgtatgtcgcggaggcgg

SEQ ID NO: 14786 - DNA, 21 bp, synthetic construct
  misc_feature 1..21: note = Synthetic
  source 1..21: mol_type = other DNA
tcgtgtgggggtccagctgga

SEQ ID NO: 14787 - DNA, 21 bp, synthetic construct
  misc_feature 1..21: note = Synthetic
  source 1..21: mol_type = other DNA
tcgttgatgatatctgtccaa

SEQ ID NO: 14788 - DNA, 21 bp, synthetic construct
  misc_feature 1..21: note = Synthetic
  source 1..21: mol_type = other DNA
tcgttggtcccgcactctttg

SEQ ID NO: 14789 - DNA, 21 bp, synthetic construct
  misc_feature 1..21: note = Synthetic
  source 1..21: mol_type = other DNA
tcgttgtcgcaggcccacagc

SEQ ID NO: 14790 - DNA, 21 bp, synthetic construct
  misc_feature 1..21: note = Synthetic
  source 1..21: mol_type = other DNA
tcgtttctttcgcatctgtcg

SEQ ID NO: 14791 - DNA, 21 bp, synthetic construct
  misc_feature 1..21: note = Synthetic
  source 1..21: mol_type = other DNA
tctagcaaggcttgcatagaa

SEQ ID NO: 14792 - DNA, 21 bp, synthetic construct
  misc_feature 1..21: note = Synthetic
  source 1..21: mol_type = other DNA
tctagccatgttgcagacttt

SEQ ID NO: 14793 - DNA, 21 bp, synthetic construct
  misc_feature 1..21: note = Synthetic
  source 1..21: mol_type = other DNA
tctagggtgatgccattgggc

SEQ ID NO: 14794 - DNA, 21 bp, synthetic construct
  misc_feature 1..21: note = Synthetic
  source 1..21: mol_type = other DNA
tctatacagtggtttaaaaag

SEQ ID NO: 14795 - DNA, 21 bp, synthetic construct
  misc_feature 1..21: note = Synthetic
  source 1..21: mol_type = other DNA
tctattgctggccacctccgt

SEQ ID NO: 14796 - DNA, 21 bp, synthetic construct
  misc_feature 1..21: note = Synthetic
  source 1..21: mol_type = other DNA
tctcacaccagttcactcctc

SEQ ID NO: 14797 - DNA, 21 bp, synthetic construct
  misc_feature 1..21: note = Synthetic
  source 1..21: mol_type = other DNA
tctcaggaagggttctgggca

SEQ ID NO: 14798 - DNA, 21 bp, synthetic construct
  misc_feature 1..21: note = Synthetic
  source 1..21: mol_type = other DNA
tctcaggcacttaataaatat

SEQ ID NO: 14799 - DNA, 21 bp, synthetic construct
  misc_feature 1..21: note = Synthetic
  source 1..21: mol_type = other DNA
tctcatttcctctgccagcaa

SEQ ID NO: 14800 - DNA, 21 bp, synthetic construct
  misc_feature 1..21: note = Synthetic
  source 1..21: mol_type = other DNA
tctccaactcctgaactcaag

SEQ ID NO: 14801 - DNA, 21 bp, synthetic construct
  misc_feature 1..21: note = Synthetic
  source 1..21: mol_type = other DNA
tctccaccgtggtgagcccag

SEQ ID NO: 14802 - DNA, 21 bp, synthetic construct
  misc_feature 1..21: note = Synthetic
  source 1..21: mol_type = other DNA
tctcccaaaaagcgttgcaca

SEQ ID NO: 14803 - DNA, 21 bp, synthetic construct
  misc_feature 1..21: note = Synthetic
  source 1..21: mol_type = other DNA
tctcccagaagccactcatac

SEQ ID NO: 14804 - DNA, 21 bp, synthetic construct
  misc_feature 1..21: note = Synthetic
  source 1..21: mol_type = other DNA
tctccctgaataacgttttcc

SEQ ID NO: 14805 - DNA, 21 bp, synthetic construct
  misc_feature 1..21: note = Synthetic
  source 1..21: mol_type = other DNA
tctccggacatcagtgcaaca

SEQ ID NO: 14806 - DNA, 21 bp, synthetic construct
  misc_feature 1..21: note = Synthetic
  source 1..21: mol_type = other DNA
tctcctgacctcatgatccac

SEQ ID NO: 14807 - DNA, 21 bp, synthetic construct
  misc_feature 1..21: note = Synthetic
  source 1..21: mol_type = other DNA
tctcctgcctcagcctcccga

SEQ ID NO: 14808 - DNA, 21 bp, synthetic construct
  misc_feature 1..21: note = Synthetic
  source 1..21: mol_type = other DNA
tctcctgggactcatcagagc

SEQ ID NO: 14809 - DNA, 21 bp, synthetic construct
  misc_feature 1..21: note = Synthetic
  source 1..21: mol_type = other DNA
tctcctgggtggccactgcag

SEQ ID NO: 14810 - DNA, 21 bp, synthetic construct
  misc_feature 1..21: note = Synthetic
  source 1..21: mol_type = other DNA
tctcgaggggtagctgtagcc

SEQ ID NO: 14811 - DNA, 21 bp, synthetic construct
  misc_feature 1..21: note = Synthetic
  source 1..21: mol_type = other DNA
tctcgatattcacgatcacgg

SEQ ID NO: 14812 - DNA, 21 bp, synthetic construct
  misc_feature 1..21: note = Synthetic
  source 1..21: mol_type = other DNA
tctcgatctcctgacctcatg

SEQ ID NO: 14813 - DNA, 21 bp, synthetic construct
  misc_feature 1..21: note = Synthetic
  source 1..21: mol_type = other DNA
tctcgctctgtcgcccaggcc

SEQ ID NO: 14814 - DNA, 21 bp, synthetic construct
  misc_feature 1..21: note = Synthetic
  source 1..21: mol_type = other DNA
tctcgctttgttgctcaggcc

SEQ ID NO: 14815 - DNA, 21 bp, synthetic construct
  misc_feature 1..21: note = Synthetic
  source 1..21: mol_type = other DNA
tctcggctcactgcaagctcc

SEQ ID NO: 14816 - DNA, 21 bp, synthetic construct
  misc_feature 1..21: note = Synthetic
  source 1..21: mol_type = other DNA
tctcggctgcagaccaaggag

SEQ ID NO: 14817 - DNA, 21 bp, synthetic construct
  misc_feature 1..21: note = Synthetic
  source 1..21: mol_type = other DNA
tctcggtgccaccacggattc

SEQ ID NO: 14818 - DNA, 21 bp, synthetic construct
  misc_feature 1..21: note = Synthetic
  source 1..21: mol_type = other DNA
tctctagccatgttgcagact

SEQ ID NO: 14819 - DNA, 21 bp, synthetic construct
  misc_feature 1..21: note = Synthetic
  source 1..21: mol_type = other DNA
tctctccggacatcagtgcaa

SEQ ID NO: 14820 - DNA, 21 bp, synthetic construct
  misc_feature 1..21: note = Synthetic
  source 1..21: mol_type = other DNA
tctctgctgatgacggtgtca

SEQ ID NO: 14821 - DNA, 21 bp, synthetic construct
  misc_feature 1..21: note = Synthetic
  source 1..21: mol_type = other DNA
tctctgggacaggtcagacca

SEQ ID NO: 14822 - DNA, 21 bp, synthetic construct
  misc_feature 1..21: note = Synthetic
  source 1..21: mol_type = other DNA
tctctgggcctgacatcccct

SEQ ID NO: 14823 - DNA, 21 bp, synthetic construct
  misc_feature 1..21: note = Synthetic
  source 1..21: mol_type = other DNA
tctctgtccccggcattcatt

SEQ ID NO: 14824 - DNA, 21 bp, synthetic construct
  misc_feature 1..21: note = Synthetic
  source 1..21: mol_type = other DNA
tctctgtctttgaataaaaca

SEQ ID NO: 14825 - DNA, 21 bp, synthetic construct
  misc_feature 1..21: note = Synthetic
  source 1..21: mol_type = other DNA
tctcttatccttcacgaggaa

SEQ ID NO: 14826 - DNA, 21 bp, synthetic construct
  misc_feature 1..21: note = Synthetic
  source 1..21: mol_type = other DNA
tctcttggctgggtgaggttg

SEQ ID NO: 14827 - DNA, 21 bp, synthetic construct
  misc_feature 1..21: note = Synthetic
  source 1..21: mol_type = other DNA
tctgaaatagggtcttcatct

SEQ ID NO: 14828 - DNA, 21 bp, synthetic construct
  misc_feature 1..21: note = Synthetic
  source 1..21: mol_type = other DNA
tctgaactgagaaagtgcaag

SEQ ID NO: 14829 - DNA, 21 bp, synthetic construct
  misc_feature 1..21: note = Synthetic
  source 1..21: mol_type = other DNA
tctgaccagtcccggcagtct

SEQ ID NO: 14830 - DNA, 21 bp, synthetic construct
  misc_feature 1..21: note = Synthetic
  source 1..21: mol_type = other DNA
tctgacggaggctgtcactgt

SEQ ID NO: 14831 - DNA, 21 bp, synthetic construct
  misc_feature 1..21: note = Synthetic
  source 1..21: mol_type = other DNA
tctgagccgtccaagcagtcc

SEQ ID NO: 14832 - DNA, 21 bp, synthetic construct
  misc_feature 1..21: note = Synthetic
  source 1..21: mol_type = other DNA
tctgagccgttgtcgcagtcc

SEQ ID NO: 14833 - DNA, 21 bp, synthetic construct
  misc_feature 1..21: note = Synthetic
  source 1..21: mol_type = other DNA
tctgaggcaacgtttcaacct

SEQ ID NO: 14834 - DNA, 21 bp, synthetic construct
  misc_feature 1..21: note = Synthetic
  source 1..21: mol_type = other DNA
tctgagtcacagacgaactgc

SEQ ID NO: 14835 - DNA, 21 bp, synthetic construct
  misc_feature 1..21: note = Synthetic
  source 1..21: mol_type = other DNA
tctgatagacggggttgtcaa

SEQ ID NO: 14836 - DNA, 21 bp, synthetic construct
  misc_feature 1..21: note = Synthetic
  source 1..21: mol_type = other DNA
tctgccagcaacgtcgcccag

SEQ ID NO: 14837 - DNA, 21 bp, synthetic construct
  misc_feature 1..21: note = Synthetic
  source 1..21: mol_type = other DNA
tctgccaggcagtgtcccgac

SEQ ID NO: 14838 - DNA, 21 bp, synthetic construct
  misc_feature 1..21: note = Synthetic
  source 1..21: mol_type = other DNA
tctgcctcccagatgaataaa

SEQ ID NO: 14839 - DNA, 21 bp, synthetic construct
  misc_feature 1..21: note = Synthetic
  source 1..21: mol_type = other DNA
tctgcctctgggaagtggcat

SEQ ID NO: 14840 - DNA, 21 bp, synthetic construct
  misc_feature 1..21: note = Synthetic
  source 1..21: mol_type = other DNA
tctgcggggcagggaggcaca

SEQ ID NO: 14841 - DNA, 21 bp, synthetic construct
  misc_feature 1..21: note = Synthetic
  source 1..21: mol_type = other DNA
tctgctgatgacggtgtcata

SEQ ID NO: 14842 - DNA, 21 bp, synthetic construct
  misc_feature 1..21: note = Synthetic
  source 1..21: mol_type = other DNA
tctgctgttgtgtgttgaaag

SEQ ID NO: 14843 - DNA, 21 bp, synthetic construct
  misc_feature 1..21: note = Synthetic
  source 1..21: mol_type = other DNA
tctggcaggcaatgctttggt

SEQ ID NO: 14844 - DNA, 21 bp, synthetic construct
  misc_feature 1..21: note = Synthetic
  source 1..21: mol_type = other DNA
tctggccaaattcatttttta

SEQ ID NO: 14845 - DNA, 21 bp, synthetic construct
  misc_feature 1..21: note = Synthetic
  source 1..21: mol_type = other DNA
tctgggaagtggcatcatttg

SEQ ID NO: 14846 - DNA, 21 bp, synthetic construct
  misc_feature 1..21: note = Synthetic
  source 1..21: mol_type = other DNA
tctgggacaggtcagaccagt

SEQ ID NO: 14847 - DNA, 21 bp, synthetic construct
  misc_feature 1..21: note = Synthetic
  source 1..21: mol_type = other DNA
tctgggcagggacgggactcc

SEQ ID NO: 14848 - DNA, 21 bp, synthetic construct
  misc_feature 1..21: note = Synthetic
  source 1..21: mol_type = other DNA
tctgggcctgacatcccctcc

SEQ ID NO: 14849 - DNA, 21 bp, synthetic construct
  misc_feature 1..21: note = Synthetic
  source 1..21: mol_type = other DNA
tctggggacagtaggttttca

SEQ ID NO: 14850 - DNA, 21 bp, synthetic construct
  misc_feature 1..21: note = Synthetic
  source 1..21: mol_type = other DNA
tctgtacagggacgcatttac

SEQ ID NO: 14851 - DNA, 21 bp, synthetic construct
  misc_feature 1..21: note = Synthetic
  source 1..21: mol_type = other DNA
tctgtcaagctgggtgctgca

SEQ ID NO: 14852 - DNA, 21 bp, synthetic construct
  misc_feature 1..21: note = Synthetic
  source 1..21: mol_type = other DNA
tctgtcacacagctgcccccg

SEQ ID NO: 14853 - DNA, 21 bp, synthetic construct
  misc_feature 1..21: note = Synthetic
  source 1..21: mol_type = other DNA
tctgtccaaaatactttgtcc

SEQ ID NO: 14854 - DNA, 21 bp, synthetic construct
  misc_feature 1..21: note = Synthetic
  source 1..21: mol_type = other DNA
tctgtccccggcattcattga

SEQ ID NO: 14855 - DNA, 21 bp, synthetic construct
  misc_feature 1..21: note = Synthetic
  source 1..21: mol_type = other DNA
tctgtcgcccacgtggctgaa

SEQ ID NO: 14856 - DNA, 21 bp, synthetic construct
  misc_feature 1..21: note = Synthetic
  source 1..21: mol_type = other DNA
tctgtcgcccactgcagtccc

SEQ ID NO: 14857 - DNA, 21 bp, synthetic construct
  misc_feature 1..21: note = Synthetic
  source 1..21: mol_type = other DNA
tctgtcgcccaggccagactg

SEQ ID NO: 14858 - DNA, 21 bp, synthetic construct
  misc_feature 1..21: note = Synthetic
  source 1..21: mol_type = other DNA
tctgtctcgaggggtagctgt

SEQ ID NO: 14859 - DNA, 21 bp, synthetic construct
  misc_feature 1..21: note = Synthetic
  source 1..21: mol_type = other DNA
tctgtctttgaataaaacaag

SEQ ID NO: 14860 - DNA, 21 bp, synthetic construct
  misc_feature 1..21: note = Synthetic
  source 1..21: mol_type = other DNA
tctgtgaacttgatcggggct

SEQ ID NO: 14861 - DNA, 21 bp, synthetic construct
  misc_feature 1..21: note = Synthetic
  source 1..21: mol_type = other DNA
tctgtgaggcagctcctcatg

SEQ ID NO: 14862 - DNA, 21 bp, synthetic construct
  misc_feature 1..21: note = Synthetic
  source 1..21: mol_type = other DNA
tctgtggtcttctgatagacg

SEQ ID NO: 14863 - DNA, 21 bp, synthetic construct
  misc_feature 1..21: note = Synthetic
  source 1..21: mol_type = other DNA
tctgttgcccaggctggagtg

SEQ ID NO: 14864 - DNA, 21 bp, synthetic construct
  misc_feature 1..21: note = Synthetic
  source 1..21: mol_type = other DNA
tcttaagccgccagttcttcc

SEQ ID NO: 14865 - DNA, 21 bp, synthetic construct
  misc_feature 1..21: note = Synthetic
  source 1..21: mol_type = other DNA
tcttaaggtcattgcagacgt

SEQ ID NO: 14866 - DNA, 21 bp, synthetic construct
  misc_feature 1..21: note = Synthetic
  source 1..21: mol_type = other DNA
tcttactatgttgcccaggct

SEQ ID NO: 14867 - DNA, 21 bp, synthetic construct
  misc_feature 1..21: note = Synthetic
  source 1..21: mol_type = other DNA
tcttatccttcacgaggaaag

SEQ ID NO: 14868 - DNA, 21 bp, synthetic construct
  misc_feature 1..21: note = Synthetic
  source 1..21: mol_type = other DNA
tcttcacgcccttggtatccg

SEQ ID NO: 14869 - DNA, 21 bp, synthetic construct
  misc_feature 1..21: note = Synthetic
  source 1..21: mol_type = other DNA
tcttcacgcgggagtctgacg

SEQ ID NO: 14870 - DNA, 21 bp, synthetic construct
  misc_feature 1..21: note = Synthetic
  source 1..21: mol_type = other DNA
tcttcatctgttgcccaggct

SEQ ID NO: 14871 - DNA, 21 bp, synthetic construct
  misc_feature 1..21: note = Synthetic
  source 1..21: mol_type = other DNA
tcttccatagaaggaagaccc

SEQ ID NO: 14872 - DNA, 21 bp, synthetic construct
  misc_feature 1..21: note = Synthetic
  source 1..21: mol_type = other DNA
tcttccatgtttgaggattgt

SEQ ID NO: 14873 - DNA, 21 bp, synthetic construct
  misc_feature 1..21: note = Synthetic
  source 1..21: mol_type = other DNA
tcttccggttgcccccgttga

SEQ ID NO: 14874 - DNA, 21 bp, synthetic construct
  misc_feature 1..21: note = Synthetic
  source 1..21: mol_type = other DNA
tcttcctgacctcgtgccggt

SEQ ID NO: 14875 - DNA, 21 bp, synthetic construct
  misc_feature 1..21: note = Synthetic
  source 1..21: mol_type = other DNA
tcttcgcagtcggggtcgttg

SEQ ID NO: 14876 - DNA, 21 bp, synthetic construct
  misc_feature 1..21: note = Synthetic
  source 1..21: mol_type = other DNA
tcttcgcatcttcgctgggcc

SEQ ID NO: 14877 - DNA, 21 bp, synthetic construct
  misc_feature 1..21: note = Synthetic
  source 1..21: mol_type = other DNA
tcttcgctgggccaccagctg

SEQ ID NO: 14878 - DNA, 21 bp, synthetic construct
  misc_feature 1..21: note = Synthetic
  source 1..21: mol_type = other DNA
tcttctcatttcctctgccag

SEQ ID NO: 14879 - DNA, 21 bp, synthetic construct
  misc_feature 1..21: note = Synthetic
  source 1..21: mol_type = other DNA
tcttctctgtctttgaataaa

SEQ ID NO: 14880 - DNA, 21 bp, synthetic construct
  misc_feature 1..21: note = Synthetic
  source 1..21: mol_type = other DNA
tcttctgatagacggggttgt

SEQ ID NO: 14881 - DNA, 21 bp, synthetic construct
  misc_feature 1..21: note = Synthetic
  source 1..21: mol_type = other DNA
tcttgatcttggcgggagttc

SEQ ID NO: 14882 - DNA, 21 bp, synthetic construct
  misc_feature 1..21: note = Synthetic
  source 1..21: mol_type = other DNA
tcttggcactggaactcgttt

SEQ ID NO: 14883 - DNA, 21 bp, synthetic construct
  misc_feature 1..21: note = Synthetic
  source 1..21: mol_type = other DNA
tcttggcgggagttccccagt

SEQ ID NO: 14884 - DNA, 21 bp, synthetic construct
  misc_feature 1..21: note = Synthetic
  source 1..21: mol_type = other DNA
tcttggctgggtgaggttgtg

SEQ ID NO: 14885 - DNA, 21 bp, synthetic construct
  misc_feature 1..21: note = Synthetic
  source 1..21: mol_type = other DNA
tcttgggggagcacgtctcct

SEQ ID NO: 14886 - DNA, 21 bp, synthetic construct
  misc_feature 1..21: note = Synthetic
  source 1..21: mol_type = other DNA
tcttggggggacagccttgct

SEQ ID NO: 14887 - DNA, 21 bp, synthetic construct
  misc_feature 1..21: note = Synthetic
  source 1..21: mol_type = other DNA
tctttcgcatctgtcgcccac

SEQ ID NO: 14888 - DNA, 21 bp, synthetic construct
  misc_feature 1..21: note = Synthetic
  source 1..21: mol_type = other DNA
tctttgaataaaacaaggccg

SEQ ID NO: 14889 - DNA, 21 bp, synthetic construct
  misc_feature 1..21: note = Synthetic
  source 1..21: mol_type = other DNA
tctttgatgggttcatctgac

SEQ ID NO: 14890 - DNA, 21 bp, synthetic construct
  misc_feature 1..21: note = Synthetic
  source 1..21: mol_type = other DNA
tctttgtacataaagaagagg

SEQ ID NO: 14891 - DNA, 21 bp, synthetic construct
  misc_feature 1..21: note = Synthetic
  source 1..21: mol_type = other DNA
tcttttcatcctccaagatgg

SEQ ID NO: 14892 - DNA, 21 bp, synthetic construct
  misc_feature 1..21: note = Synthetic
  source 1..21: mol_type = other DNA
tgaaaatggcttcgttgatga

SEQ ID NO: 14893 - DNA, 21 bp, synthetic construct
  misc_feature 1..21: note = Synthetic
  source 1..21: mol_type = other DNA
tgaaagccacttgcttctctg

SEQ ID NO: 14894 - DNA, 21 bp, synthetic construct
  misc_feature 1..21: note = Synthetic
  source 1..21: mol_type = other DNA
tgaaatagggtcttcatctgt

SEQ ID NO: 14895 - DNA, 21 bp, synthetic construct
  misc_feature 1..21: note = Synthetic
  source 1..21: mol_type = other DNA
tgaacaaatacagcaaccagg

SEQ ID NO: 14896 - DNA, 21 bp, synthetic construct
  misc_feature 1..21: note = Synthetic
  source 1..21: mol_type = other DNA
tgaacaggatccaccacgatg

SEQ ID NO: 14897 - DNA, 21 bp, synthetic construct
  misc_feature 1..21: note = Synthetic
  source 1..21: mol_type = other DNA
tgaactcaagtgatccagctc

SEQ ID NO: 14898 - DNA, 21 bp, synthetic construct
  misc_feature 1..21: note = Synthetic
  source 1..21: mol_type = other DNA
tgaactgagaaagtgcaagga

SEQ ID NO: 14899 - DNA, 21 bp, synthetic construct
  misc_feature 1..21: note = Synthetic
  source 1..21: mol_type = other DNA
tgaacttgatcggggctggtg

SEQ ID NO: 14900 - DNA, 21 bp, synthetic construct
  misc_feature 1..21: note = Synthetic
  source 1..21: mol_type = other DNA
tgaacttgttgggtccctcgc

SEQ ID NO: 14901 - DNA, 21 bp, synthetic construct
  misc_feature 1..21: note = Synthetic
  source 1..21: mol_type = other DNA
tgaagaagaggtaggcgatgg

SEQ ID NO: 14902 - DNA, 21 bp, synthetic construct
  misc_feature 1..21: note = Synthetic
  source 1..21: mol_type = other DNA
tgaagatctcggctgcagacc

SEQ ID NO: 14903 - DNA, 21 bp, synthetic construct
  misc_feature 1..21: note = Synthetic
  source 1..21: mol_type = other DNA
tgaagccatgaacaggatcca

SEQ ID NO: 14904 - DNA, 21 bp, synthetic construct
  misc_feature 1..21: note = Synthetic
  source 1..21: mol_type = other DNA
tgaagtccccggatttgcagg

SEQ ID NO: 14905 - DNA, 21 bp, synthetic construct
  misc_feature 1..21: note = Synthetic
  source 1..21: mol_type = other DNA
tgaagtcccggtcaacctgcc

SEQ ID NO: 14906 - DNA, 21 bp, synthetic construct
  misc_feature 1..21: note = Synthetic
  source 1..21: mol_type = other DNA
tgaagtcccgtcaaacgatcc

SEQ ID NO: 14907 - DNA, 21 bp, synthetic construct
  misc_feature 1..21: note = Synthetic
  source 1..21: mol_type = other DNA
tgaagtttggagtcaacccag

SEQ ID NO: 14908 - DNA, 21 bp, synthetic construct
  misc_feature 1..21: note = Synthetic
  source 1..21: mol_type = other DNA
tgaataaaacaaggccggcga

SEQ ID NO: 14909 - DNA, 21 bp, synthetic construct
  misc_feature 1..21: note = Synthetic
  source 1..21: mol_type = other DNA
tgaataaatatataaaacaaa

SEQ ID NO: 14910 - DNA, 21 bp, synthetic construct
  misc_feature 1..21: note = Synthetic
  source 1..21: mol_type = other DNA
tgaataacgttttcctcttca

SEQ ID NO: 14911 - DNA, 21 bp, synthetic construct
  misc_feature 1..21: note = Synthetic
  source 1..21: mol_type = other DNA
tgaatccctttcctggcttaa

SEQ ID NO: 14912 - DNA, 21 bp, synthetic construct
  misc_feature 1..21: note = Synthetic
  source 1..21: mol_type = other DNA
tgaatgagtttggtctcggtg

SEQ ID NO: 14913 - DNA, 21 bp, synthetic construct
  misc_feature 1..21: note = Synthetic
  source 1..21: mol_type = other DNA
tgaatggcttggaggcatttg

SEQ ID NO: 14914 - DNA, 21 bp, synthetic construct
  misc_feature 1..21: note = Synthetic
  source 1..21: mol_type = other DNA
tgaatgttttcagtcaccagc

SEQ ID NO: 14915 - DNA, 21 bp, synthetic construct
  misc_feature 1..21: note = Synthetic
  source 1..21: mol_type = other DNA
tgacacccatctcccagaagc

SEQ ID NO: 14916 - DNA, 21 bp, synthetic construct
  misc_feature 1..21: note = Synthetic
  source 1..21: mol_type = other DNA
tgacacggcccccacagctga

SEQ ID NO: 14917 - DNA, 21 bp, synthetic construct
  misc_feature 1..21: note = Synthetic
  source 1..21: mol_type = other DNA
tgacacgggctttccctggcc

SEQ ID NO: 14918 - DNA, 21 bp, synthetic construct
  misc_feature 1..21: note = Synthetic
  source 1..21: mol_type = other DNA
tgacactcatcgatatcgcac

SEQ ID NO: 14919 - DNA, 21 bp, synthetic construct
  misc_feature 1..21: note = Synthetic
  source 1..21: mol_type = other DNA
tgacactcatcgatatcttcg

SEQ ID NO: 14920 - DNA, 21 bp, synthetic construct
  misc_feature 1..21: note = Synthetic
  source 1..21: mol_type = other DNA
tgacacttgaacttgttgggt

SEQ ID NO: 14921 - DNA, 21 bp, synthetic construct
  misc_feature 1..21: note = Synthetic
  source 1..21: mol_type = other DNA
tgacagacaagcacgtctcct

SEQ ID NO: 14922 - DNA, 21 bp, synthetic construct
  misc_feature 1..21: note = Synthetic
  source 1..21: mol_type = other DNA
tgacagccacacctgggtgca

SEQ ID NO: 14923 - DNA, 21 bp, synthetic construct
  misc_feature 1..21: note = Synthetic
  source 1..21: mol_type = other DNA
tgacaggaaccgcggaggaac

SEQ ID NO: 14924 - DNA, 21 bp, synthetic construct
  misc_feature 1..21: note = Synthetic
  source 1..21: mol_type = other DNA
tgacagggcaaaggctaacct

SEQ ID NO: 14925 - DNA, 21 bp, synthetic construct
  misc_feature 1..21: note = Synthetic
  source 1..21: mol_type = other DNA
tgacatcccctcccctttcat

SEQ ID NO: 14926 - DNA, 21 bp, synthetic construct
  misc_feature 1..21: note = Synthetic
  source 1..21: mol_type = other DNA
tgacatcgatgcttgagatgg

SEQ ID NO: 14927 - DNA, 21 bp, synthetic construct
  misc_feature 1..21: note = Synthetic
  source 1..21: mol_type = other DNA
tgacatcggaacctgtgaggc

SEQ ID NO: 14928 - DNA, 21 bp, synthetic construct
  misc_feature 1..21: note = Synthetic
  source 1..21: mol_type = other DNA
tgacatcttcacgcgggagtc

SEQ ID NO: 14929 - DNA, 21 bp, synthetic construct
  misc_feature 1..21: note = Synthetic
  source 1..21: mol_type = other DNA
tgaccagtcccggcagtctct

SEQ ID NO: 14930 - DNA, 21 bp, synthetic construct
  misc_feature 1..21: note = Synthetic
  source 1..21: mol_type = other DNA
tgaccagtgactcaggctctg

SEQ ID NO: 14931 - DNA, 21 bp, synthetic construct
  misc_feature 1..21: note = Synthetic
  source 1..21: mol_type = other DNA
tgaccatcgaggggtagctgt

SEQ ID NO: 14932 - DNA, 21 bp, synthetic construct
  misc_feature 1..21: note = Synthetic
  source 1..21: mol_type = other DNA
tgaccatctgtctcgaggggt

SEQ ID NO: 14933 - DNA, 21 bp, synthetic construct
  misc_feature 1..21: note = Synthetic
  source 1..21: mol_type = other DNA
tgacctcatgatccacccgcc

SEQ ID NO: 14934 - DNA, 21 bp, synthetic construct
  misc_feature 1..21: note = Synthetic
  source 1..21: mol_type = other DNA
tgacctcgtgccggttggtga

SEQ ID NO: 14935 - DNA, 21 bp, synthetic construct
  misc_feature 1..21: note = Synthetic
  source 1..21: mol_type = other DNA
tgacctttagcctgacggtgg

SEQ ID NO: 14936 - DNA, 21 bp, synthetic construct
  misc_feature 1..21: note = Synthetic
  source 1..21: mol_type = other DNA
tgacggaggctgtcactgtct

SEQ ID NO: 14937 - DNA, 21 bp, synthetic construct
  misc_feature 1..21: note = Synthetic
  source 1..21: mol_type = other DNA
tgacggtggatgtctcctggg

SEQ ID NO: 14938 - DNA, 21 bp, synthetic construct
  misc_feature 1..21: note = Synthetic
  source 1..21: mol_type = other DNA
tgacggtgtcataggaagaga

SEQ ID NO: 14939 - DNA, 21 bp, synthetic construct
  misc_feature 1..21: note = Synthetic
  source 1..21: mol_type = other DNA
tgactcaggctctgcctctgg

SEQ ID NO: 14940 - DNA, 21 bp, synthetic construct
  misc_feature 1..21: note = Synthetic
  source 1..21: mol_type = other DNA
tgactcctgagtttaggggtt

SEQ ID NO: 14941 - DNA, 21 bp, synthetic construct
  misc_feature 1..21: note = Synthetic
  source 1..21: mol_type = other DNA
tgagaaagtgcaaggagacca

SEQ ID NO: 14942 - DNA, 21 bp, synthetic construct
  misc_feature 1..21: note = Synthetic
  source 1..21: mol_type = other DNA
tgagacattgtcactatctcc

SEQ ID NO: 14943 - DNA, 21 bp, synthetic construct
  misc_feature 1..21: note = Synthetic
  source 1..21: mol_type = other DNA
tgagacggagtctcgctctgt

SEQ ID NO: 14944 - DNA, 21 bp, synthetic construct
  misc_feature 1..21: note = Synthetic
  source 1..21: mol_type = other DNA
tgagatggagtgaagtttgga

SEQ ID NO: 14945 - DNA, 21 bp, synthetic construct
  misc_feature 1..21: note = Synthetic
  source 1..21: mol_type = other DNA
tgagcaccgggcaggaggcct

SEQ ID NO: 14946 - DNA, 21 bp, synthetic construct
  misc_feature 1..21: note = Synthetic
  source 1..21: mol_type = other DNA
tgagccactgcgcccggcctc

SEQ ID NO: 14947 - DNA, 21 bp, synthetic construct
  misc_feature 1..21: note = Synthetic
  source 1..21: mol_type = other DNA
tgagcccaggggtggccccag

SEQ ID NO: 14948 - DNA, 21 bp, synthetic construct
  misc_feature 1..21: note = Synthetic
  source 1..21: mol_type = other DNA
tgagccgtccaagcagtcccg

SEQ ID NO: 14949 - DNA, 21 bp, synthetic construct
  misc_feature 1..21: note = Synthetic
  source 1..21: mol_type = other DNA
tgagccgttgtcgcagtccac

SEQ ID NO: 14950 - DNA, 21 bp, synthetic construct
  misc_feature 1..21: note = Synthetic
  source 1..21: mol_type = other DNA
tgagctcaaaccatcctccca

SEQ ID NO: 14951 - DNA, 21 bp, synthetic construct
  misc_feature 1..21: note = Synthetic
  source 1..21: mol_type = other DNA
tgaggaatgcagcggttgaca

SEQ ID NO: 14952 - DNA, 21 bp, synthetic construct
  misc_feature 1..21: note = Synthetic
  source 1..21: mol_type = other DNA
tgaggagatctagggtgatgc

SEQ ID NO: 14953 - DNA, 21 bp, synthetic construct
  misc_feature 1..21: note = Synthetic
  source 1..21: mol_type = other DNA
tgaggattgtgtcacggtgga

SEQ ID NO: 14954 - DNA, 21 bp, synthetic construct
  misc_feature 1..21: note = Synthetic
  source 1..21: mol_type = other DNA
tgaggcaacgtttcaacctcg

SEQ ID NO: 14955 - DNA, 21 bp, synthetic construct
  misc_feature 1..21: note = Synthetic
  source 1..21: mol_type = other DNA
tgaggcacctgtgtctggcca

SEQ ID NO: 14956 - DNA, 21 bp, synthetic construct
  misc_feature 1..21: note = Synthetic
  source 1..21: mol_type = other DNA
tgaggcagctcctcatgtccc

SEQ ID NO: 14957 - DNA, 21 bp, synthetic construct
  misc_feature 1..21: note = Synthetic
  source 1..21: mol_type = other DNA
tgaggcagggccagggggtcc

SEQ ID NO: 14958 - DNA, 21 bp, synthetic construct
  misc_feature 1..21: note = Synthetic
  source 1..21: mol_type = other DNA
tgaggcggttggcactgaaaa

SEQ ID NO: 14959 - DNA, 21 bp, synthetic construct
  misc_feature 1..21: note = Synthetic
  source 1..21: mol_type = other DNA
tgaggctggtgtactcgctcc

SEQ ID NO: 14960 - DNA, 21 bp, synthetic construct
  misc_feature 1..21: note = Synthetic
  source 1..21: mol_type = other DNA
tgagggtggccgggggcccct

SEQ ID NO: 14961 - DNA, 21 bp, synthetic construct
  misc_feature 1..21: note = Synthetic
  source 1..21: mol_type = other DNA
tgaggttgtggaagagaacca

SEQ ID NO: 14962 - DNA, 21 bp, synthetic construct
  misc_feature 1..21: note = Synthetic
  source 1..21: mol_type = other DNA
tgagtcacagacgaactgccg

SEQ ID NO: 14963 - DNA, 21 bp, synthetic construct
  misc_feature 1..21: note = Synthetic
  source 1..21: mol_type = other DNA
tgagtttaggggtttggctta

SEQ ID NO: 14964 - DNA, 21 bp, synthetic construct
  misc_feature 1..21: note = Synthetic
  source 1..21: mol_type = other DNA
tgagtttggtctcggtgccac

SEQ ID NO: 14965 - DNA, 21 bp, synthetic construct
  misc_feature 1..21: note = Synthetic
  source 1..21: mol_type = other DNA
tgataacagtttcaaccaata

SEQ ID NO: 14966 - DNA, 21 bp, synthetic construct
  misc_feature 1..21: note = Synthetic
  source 1..21: mol_type = other DNA
tgatagacggggttgtcaaag

SEQ ID NO: 14967 - DNA, 21 bp, synthetic construct
  misc_feature 1..21: note = Synthetic
  source 1..21: mol_type = other DNA
tgatatctgtccaaaatactt

SEQ ID NO: 14968 - DNA, 21 bp, synthetic construct
  misc_feature 1..21: note = Synthetic
  source 1..21: mol_type = other DNA
tgatcacagtaagacattcag

SEQ ID NO: 14969 - DNA, 21 bp, synthetic construct
  misc_feature 1..21: note = Synthetic
  source 1..21: mol_type = other DNA
tgatccacccgcctcggcctc

SEQ ID NO: 14970 - DNA, 21 bp, synthetic construct
  misc_feature 1..21: note = Synthetic
  source 1..21: mol_type = other DNA
tgatccagctcagcctcccaa

SEQ ID NO: 14971 - DNA, 21 bp, synthetic construct
  misc_feature 1..21: note = Synthetic
  source 1..21: mol_type = other DNA
tgatcggggctggtggggcga

SEQ ID NO: 14972 - DNA, 21 bp, synthetic construct
  misc_feature 1..21: note = Synthetic
  source 1..21: mol_type = other DNA
tgatctgcggggcagggaggc

SEQ ID NO: 14973 - DNA, 21 bp, synthetic construct
  misc_feature 1..21: note = Synthetic
  source 1..21: mol_type = other DNA
tgatcttggcgggagttcccc

SEQ ID NO: 14974 - DNA, 21 bp, synthetic construct
  misc_feature 1..21: note = Synthetic
  source 1..21: mol_type = other DNA
tgatgacggtgtcataggaag

SEQ ID NO: 14975 - DNA, 21 bp, synthetic construct
  misc_feature 1..21: note = Synthetic
  source 1..21: mol_type = other DNA
tgatgatatctgtccaaaata

SEQ ID NO: 14976 - DNA, 21 bp, synthetic construct
  misc_feature 1..21: note = Synthetic
  source 1..21: mol_type = other DNA
tgatgcaccatgcatggtttt

SEQ ID NO: 14977 - DNA, 21 bp, synthetic construct
  misc_feature 1..21: note = Synthetic
  source 1..21: mol_type = other DNA
tgatgcattcgccgctgtgac

SEQ ID NO: 14978 - DNA, 21 bp, synthetic construct
  misc_feature 1..21: note = Synthetic
  source 1..21: mol_type = other DNA
tgatgccattgggccactgaa

SEQ ID NO: 14979 - DNA, 21 bp, synthetic construct
  misc_feature 1..21: note = Synthetic
  source 1..21: mol_type = other DNA
tgatgctgttgatgttcttaa

SEQ ID NO: 14980 - DNA, 21 bp, synthetic construct
  misc_feature 1..21: note = Synthetic
  source 1..21: mol_type = other DNA
tgatgggttcatctgaccagt

SEQ ID NO: 14981 - DNA, 21 bp, synthetic construct
  misc_feature 1..21: note = Synthetic
  source 1..21: mol_type = other DNA
tgatgttcttaagccgccagt

SEQ ID NO: 14982 - DNA, 21 bp, synthetic construct
  misc_feature 1..21: note = Synthetic
  source 1..21: mol_type = other DNA
tgattcgggggtgacagggca

SEQ ID NO: 14983 - DNA, 21 bp, synthetic construct
  misc_feature 1..21: note = Synthetic
  source 1..21: mol_type = other DNA
tgatttttaactttttggttt

SEQ ID NO: 14984 - DNA, 21 bp, synthetic construct
  misc_feature 1..21: note = Synthetic
  source 1..21: mol_type = other DNA
tgcaaaaataaatagatttta

SEQ ID NO: 14985 - DNA, 21 bp, synthetic construct
  misc_feature 1..21: note = Synthetic
  source 1..21: mol_type = other DNA
tgcaaaataataacacaaatg

SEQ ID NO: 14986 - DNA, 21 bp, synthetic construct
  misc_feature 1..21: note = Synthetic
  source 1..21: mol_type = other DNA
tgcaaacataacaaaaaatcc

SEQ ID NO: 14987 - DNA, 21 bp, synthetic construct
  misc_feature 1..21: note = Synthetic
  source 1..21: mol_type = other DNA
tgcaaataatctttgtacata

SEQ ID NO: 14988 - DNA, 21 bp, synthetic construct
  misc_feature 1..21: note = Synthetic
  source 1..21: mol_type = other DNA
tgcaacagtaacacggcgatt

SEQ ID NO: 14989 - DNA, 21 bp, synthetic construct
  misc_feature 1..21: note = Synthetic
  source 1..21: mol_type = other DNA
tgcaacctccacctcctgggc

SEQ ID NO: 14990 - DNA, 21 bp, synthetic construct
  misc_feature 1..21: note = Synthetic
  source 1..21: mol_type = other DNA
tgcaagctccgcttcccgggt

SEQ ID NO: 14991 - DNA, 21 bp, synthetic construct
  misc_feature 1..21: note = Synthetic
  source 1..21: mol_type = other DNA
tgcaaggagaccacgggaatg

SEQ ID NO: 14992 - DNA, 21 bp, synthetic construct
  misc_feature 1..21: note = Synthetic
  source 1..21: mol_type = other DNA
tgcacacagtccagttcgtgc

SEQ ID NO: 14993 - DNA, 21 bp, synthetic construct
  misc_feature 1..21: note = Synthetic
  source 1..21: mol_type = other DNA
tgcaccatgcatggttttttt

SEQ ID NO: 14994 - DNA, 21 bp, synthetic construct
  misc_feature 1..21: note = Synthetic
  source 1..21: mol_type = other DNA
tgcactcgccacttaggcagt

SEQ ID NO: 14995 - DNA, 21 bp, synthetic construct
  misc_feature 1..21: note = Synthetic
  source 1..21: mol_type = other DNA
tgcactggaagctggcgggac

SEQ ID NO: 14996 - DNA, 21 bp, synthetic construct
  misc_feature 1..21: note = Synthetic
  source 1..21: mol_type = other DNA
tgcactgggggggacacagtg

SEQ ID NO: 14997 - DNA, 21 bp, synthetic construct
  misc_feature 1..21: note = Synthetic
  source 1..21: mol_type = other DNA
tgcacttcccatcgtggcagc

SEQ ID NO: 14998 - DNA, 21 bp, synthetic construct
  misc_feature 1..21: note = Synthetic
  source 1..21: mol_type = other DNA
tgcagaccaaggaggggcggg

SEQ ID NO: 14999 - DNA, 21 bp, synthetic construct
  misc_feature 1..21: note = Synthetic
  source 1..21: mol_type = other DNA
tgcagacgtgggaacagccgc

SEQ ID NO: 15000 - DNA, 21 bp, synthetic construct
  misc_feature 1..21: note = Synthetic
  source 1..21: mol_type = other DNA
tgcagactttgtccagggtga

SEQ ID NO: 15001 - DNA, 21 bp, synthetic construct
  misc_feature 1..21: note = Synthetic
  source 1..21: mol_type = other DNA
tgcagatcattctctgggaca

SEQ ID NO: 15002 - DNA, 21 bp, synthetic construct
  misc_feature 1..21: note = Synthetic
  source 1..21: mol_type = other DNA
tgcagcctcagcctctcttgg

SEQ ID NO: 15003 - DNA, 21 bp, synthetic construct
  misc_feature 1..21: note = Synthetic
  source 1..21: mol_type = other DNA
tgcagcctcagcctctgtgag

SEQ ID NO: 15004 - DNA, 21 bp, synthetic construct
  misc_feature 1..21: note = Synthetic
  source 1..21: mol_type = other DNA
tgcagcggttgacacggcccc

SEQ ID NO: 15005 - DNA, 21 bp, synthetic construct
  misc_feature 1..21: note = Synthetic
  source 1..21: mol_type = other DNA
tgcaggccacgtgtcctcacg

SEQ ID NO: 15006 - DNA, 21 bp, synthetic construct
  misc_feature 1..21: note = Synthetic
  source 1..21: mol_type = other DNA
tgcaggccttcgtgtgggggt

SEQ ID NO: 15007 - DNA, 21 bp, synthetic construct
  misc_feature 1..21: note = Synthetic
  source 1..21: mol_type = other DNA
tgcaggtgacagacaagcacg

SEQ ID NO: 15008 - DNA, 21 bp, synthetic construct
  misc_feature 1..21: note = Synthetic
  source 1..21: mol_type = other DNA
tgcaggtggagctgttgcact

SEQ ID NO: 15009 - DNA, 21 bp, synthetic construct
  misc_feature 1..21: note = Synthetic
  source 1..21: mol_type = other DNA
tgcaggtgtcgggatcctgac

SEQ ID NO: 15010 - DNA, 21 bp, synthetic construct
  misc_feature 1..21: note = Synthetic
  source 1..21: mol_type = other DNA
tgcagtcatattcccggtcac

SEQ ID NO: 15011 - DNA, 21 bp, synthetic construct
  misc_feature 1..21: note = Synthetic
  source 1..21: mol_type = other DNA
tgcagtccccgccgcggcgag

SEQ ID NO: 15012 - DNA, 21 bp, synthetic construct
  misc_feature 1..21: note = Synthetic
  source 1..21: mol_type = other DNA
tgcagtcggggccaccatcac

SEQ ID NO: 15013 - DNA, 21 bp, synthetic construct
  misc_feature 1..21: note = Synthetic
  source 1..21: mol_type = other DNA
tgcagtggcgcaatctcggct

SEQ ID NO: 15014 - DNA, 21 bp, synthetic construct
  misc_feature 1..21: note = Synthetic
  source 1..21: mol_type = other DNA
tgcagtggctcgatcatggct

SEQ ID NO: 15015 - DNA, 21 bp, synthetic construct
  misc_feature 1..21: note = Synthetic
  source 1..21: mol_type = other DNA
tgcagtttccatcagagcact

SEQ ID NO: 15016 - DNA, 21 bp, synthetic construct
  misc_feature 1..21: note = Synthetic
  source 1..21: mol_type = other DNA
tgcatagaagaggtaaacacg

SEQ ID NO: 15017 - DNA, 21 bp, synthetic construct
  misc_feature 1..21: note = Synthetic
  source 1..21: mol_type = other DNA
tgcatagaagtggaagcacta

SEQ ID NO: 15018 - DNA, 21 bp, synthetic construct
  misc_feature 1..21: note = Synthetic
  source 1..21: mol_type = other DNA
tgcatgggcactgtccgaagc

SEQ ID NO: 15019 - DNA, 21 bp, synthetic construct
  misc_feature 1..21: note = Synthetic
  source 1..21: mol_type = other DNA
tgcatggtttttttttgtttt

SEQ ID NO: 15020 - DNA, 21 bp, synthetic construct
  misc_feature 1..21: note = Synthetic
  source 1..21: mol_type = other DNA
tgcatgttttaaacacatacc

SEQ ID NO: 15021 - DNA, 21 bp, synthetic construct
  misc_feature 1..21: note = Synthetic
  source 1..21: mol_type = other DNA
tgcattcgccgctgtgacact

SEQ ID NO: 15022 - DNA, 21 bp, synthetic construct
  misc_feature 1..21: note = Synthetic
  source 1..21: mol_type = other DNA
tgcatttcccgtcttggcact

SEQ ID NO: 15023 - DNA, 21 bp, synthetic construct
  misc_feature 1..21: note = Synthetic
  source 1..21: mol_type = other DNA
tgccaaatgtacacagtgtac

SEQ ID NO: 15024 - DNA, 21 bp, synthetic construct
  misc_feature 1..21: note = Synthetic
  source 1..21: mol_type = other DNA
tgccaatcccttgtgacatct

SEQ ID NO: 15025 - DNA, 21 bp, synthetic construct
  misc_feature 1..21: note = Synthetic
  source 1..21: mol_type = other DNA
tgccaccacggattcagccag

SEQ ID NO: 15026 - DNA, 21 bp, synthetic construct
  misc_feature 1..21: note = Synthetic
  source 1..21: mol_type = other DNA
tgccaccgtacccagctgatt

SEQ ID NO: 15027 - DNA, 21 bp, synthetic construct
  misc_feature 1..21: note = Synthetic
  source 1..21: mol_type = other DNA
tgccagcaacgtcgcccagag

SEQ ID NO: 15028 - DNA, 21 bp, synthetic construct
  misc_feature 1..21: note = Synthetic
  source 1..21: mol_type = other DNA
tgccaggcagtgtcccgaccc

SEQ ID NO: 15029 - DNA, 21 bp, synthetic construct
  misc_feature 1..21: note = Synthetic
  source 1..21: mol_type = other DNA
tgccatcgcagacccacttgt

SEQ ID NO: 15030 - DNA, 21 bp, synthetic construct
  misc_feature 1..21: note = Synthetic
  source 1..21: mol_type = other DNA
tgccatctgctgttgtgtgtt

SEQ ID NO: 15031 - DNA, 21 bp, synthetic construct
  misc_feature 1..21: note = Synthetic
  source 1..21: mol_type = other DNA
tgccatggatgcagtttccat

SEQ ID NO: 15032 - DNA, 21 bp, synthetic construct
  misc_feature 1..21: note = Synthetic
  source 1..21: mol_type = other DNA
tgccattgggccactgaatgt

SEQ ID NO: 15033 - DNA, 21 bp, synthetic construct
  misc_feature 1..21: note = Synthetic
  source 1..21: mol_type = other DNA
tgcccaggacagagtcggtcc

SEQ ID NO: 15034 - DNA, 21 bp, synthetic construct
  misc_feature 1..21: note = Synthetic
  source 1..21: mol_type = other DNA
tgcccaggctggaaagcagtg

SEQ ID NO: 15035 - DNA, 21 bp, synthetic construct
  misc_feature 1..21: note = Synthetic
  source 1..21: mol_type = other DNA
tgcccaggctggagtgcagtg

SEQ ID NO: 15036 - DNA, 21 bp, synthetic construct
  misc_feature 1..21: note = Synthetic
  source 1..21: mol_type = other DNA
tgcccccgagaccagagaccc

SEQ ID NO: 15037 - DNA, 21 bp, synthetic construct
  misc_feature 1..21: note = Synthetic
  source 1..21: mol_type = other DNA
tgcccccgttgacatcgatgc

SEQ ID NO: 15038 - DNA, 21 bp, synthetic construct
  misc_feature 1..21: note = Synthetic
  source 1..21: mol_type = other DNA
tgcccctctctgtccccggca

SEQ ID NO: 15039 - DNA, 21 bp, synthetic construct
  misc_feature 1..21: note = Synthetic
  source 1..21: mol_type = other DNA
tgcccgccaccacgcccggct

SEQ ID NO: 15040 - DNA, 21 bp, synthetic construct
  misc_feature 1..21: note = Synthetic
  source 1..21: mol_type = other DNA
tgccgagagatgcacttccca

SEQ ID NO: 15041 - DNA, 21 bp, synthetic construct
  misc_feature 1..21: note = Synthetic
  source 1..21: mol_type = other DNA
tgccggctgccatggatgcag

SEQ ID NO: 15042 - DNA, 21 bp, synthetic construct
  misc_feature 1..21: note = Synthetic
  source 1..21: mol_type = other DNA
tgccggttggtgaagaagagg

SEQ ID NO: 15043 - DNA, 21 bp, synthetic construct
  misc_feature 1..21: note = Synthetic
  source 1..21: mol_type = other DNA
tgccgtccgggcaggcgcagg

SEQ ID NO: 15044 - DNA, 21 bp, synthetic construct
  misc_feature 1..21: note = Synthetic
  source 1..21: mol_type = other DNA
tgcctcagcctcccaagtagc

SEQ ID NO: 15045 - DNA, 21 bp, synthetic construct
  misc_feature 1..21: note = Synthetic
  source 1..21: mol_type = other DNA
tgcctcagcctcccgagtagc

SEQ ID NO: 15046 - DNA, 21 bp, synthetic construct
  misc_feature 1..21: note = Synthetic
  source 1..21: mol_type = other DNA
tgcctcccagatgaataaata

SEQ ID NO: 15047 - DNA, 21 bp, synthetic construct
  misc_feature 1..21: note = Synthetic
  source 1..21: mol_type = other DNA
tgcctctgggaagtggcatca

SEQ ID NO: 15048 - DNA, 21 bp, synthetic construct
  misc_feature 1..21: note = Synthetic
  source 1..21: mol_type = other DNA
tgcctgagctcaaaccatcct

SEQ ID NO: 15049 - DNA, 21 bp, synthetic construct
  misc_feature 1..21: note = Synthetic
  source 1..21: mol_type = other DNA
tgcctggccagaggccatggg

SEQ ID NO: 15050 - DNA, 21 bp, synthetic construct
  misc_feature 1..21: note = Synthetic
  source 1..21: mol_type = other DNA
tgcgcccggcctcaccgtgca

SEQ ID NO: 15051 - DNA, 21 bp, synthetic construct
  misc_feature 1..21: note = Synthetic
  source 1..21: mol_type = other DNA
tgcggactgcagtggcgcaat

SEQ ID NO: 15052 - DNA, 21 bp, synthetic construct
  misc_feature 1..21: note = Synthetic
  source 1..21: mol_type = other DNA
tgcggccactcatccgagcca

SEQ ID NO: 15053 - DNA, 21 bp, synthetic construct
  misc_feature 1..21: note = Synthetic
  source 1..21: mol_type = other DNA
tgcggggcagggaggcacaga

SEQ ID NO: 15054 - DNA, 21 bp, synthetic construct
  misc_feature 1..21: note = Synthetic
  source 1..21: mol_type = other DNA
tgctcaggcctggtctccaac

SEQ ID NO: 15055 - DNA, 21 bp, synthetic construct
  misc_feature 1..21: note = Synthetic
  source 1..21: mol_type = other DNA
tgctcagggtggtcctctcac

SEQ ID NO: 15056 - DNA, 21 bp, synthetic construct
  misc_feature 1..21: note = Synthetic
  source 1..21: mol_type = other DNA
tgctccgaaaccagaaaggct

SEQ ID NO: 15057 - DNA, 21 bp, synthetic construct
  misc_feature 1..21: note = Synthetic
  source 1..21: mol_type = other DNA
tgctcgcagcctctgccaggc

SEQ ID NO: 15058 - DNA, 21 bp, synthetic construct
  misc_feature 1..21: note = Synthetic
  source 1..21: mol_type = other DNA
tgctcgtctgagccgttgtcg

SEQ ID NO: 15059 - DNA, 21 bp, synthetic construct
  misc_feature 1..21: note = Synthetic
  source 1..21: mol_type = other DNA
tgctgatgacggtgtcatagg

SEQ ID NO: 15060 - DNA, 21 bp, synthetic construct
  misc_feature 1..21: note = Synthetic
  source 1..21: mol_type = other DNA
tgctgatgcaccatgcatggt

SEQ ID NO: 15061 - DNA, 21 bp, synthetic construct
  misc_feature 1..21: note = Synthetic
  source 1..21: mol_type = other DNA
tgctgcagatcattctctggg

SEQ ID NO: 15062 - DNA, 21 bp, synthetic construct
  misc_feature 1..21: note = Synthetic
  source 1..21: mol_type = other DNA
tgctggccacctccgtgtcca

SEQ ID NO: 15063 - DNA, 21 bp, synthetic construct
  misc_feature 1..21: note = Synthetic
  source 1..21: mol_type = other DNA
tgctgggattacaggcgtgag

SEQ ID NO: 15064 - DNA, 21 bp, synthetic construct
  misc_feature 1..21: note = Synthetic
  source 1..21: mol_type = other DNA
tgctgtggatccagtccacag

SEQ ID NO: 15065 - DNA, 21 bp, synthetic construct
  misc_feature 1..21: note = Synthetic
  source 1..21: mol_type = other DNA
tgctgtgtcctagctggaaac

SEQ ID NO: 15066 - DNA, 21 bp, synthetic construct
  misc_feature 1..21: note = Synthetic
  source 1..21: mol_type = other DNA
tgctgtgtccttacggctgtg

SEQ ID NO: 15067 - DNA, 21 bp, synthetic construct
  misc_feature 1..21: note = Synthetic
  source 1..21: mol_type = other DNA
tgctgttgatgttcttaagcc

SEQ ID NO: 15068 - DNA, 21 bp, synthetic construct
  misc_feature 1..21: note = Synthetic
  source 1..21: mol_type = other DNA
tgctgttgtgtgttgaaagcc

SEQ ID NO: 15069 - DNA, 21 bp, synthetic construct
  misc_feature 1..21: note = Synthetic
  source 1..21: mol_type = other DNA
tgcttctctgggcctgacatc

SEQ ID NO: 15070 - DNA, 21 bp, synthetic construct
  misc_feature 1..21: note = Synthetic
  source 1..21: mol_type = other DNA
tgcttgagatggagtgaagtt

SEQ ID NO: 15071 - DNA, 21 bp, synthetic construct
  misc_feature 1..21: note = Synthetic
  source 1..21: mol_type = other DNA
tgctttggtcttctctgtctt

SEQ ID NO: 15072 - DNA, 21 bp, synthetic construct
  misc_feature 1..21: note = Synthetic
  source 1..21: mol_type = other DNA
tggaaaccctggcttcccgcg

SEQ ID NO: 15073 - DNA, 21 bp, synthetic construct
  misc_feature 1..21: note = Synthetic
  source 1..21: mol_type = other DNA
tggaaagcagtggcataatca

SEQ ID NO: 15074 - DNA, 21 bp, synthetic construct
  misc_feature 1..21: note = Synthetic
  source 1..21: mol_type = other DNA
tggaacacgtaaagaccccta

SEQ ID NO: 15075 - DNA, 21 bp, synthetic construct
  misc_feature 1..21: note = Synthetic
  source 1..21: mol_type = other DNA
tggaactcgaaggccgagcag

SEQ ID NO: 15076 - DNA, 21 bp, synthetic construct
  misc_feature 1..21: note = Synthetic
  source 1..21: mol_type = other DNA
tggaactcgtttctttcgcat

SEQ ID NO: 15077 - DNA, 21 bp, synthetic construct
  misc_feature 1..21: note = Synthetic
  source 1..21: mol_type = other DNA
tggaagagaaccatatcctct

SEQ ID NO: 15078 - DNA, 21 bp, synthetic construct
  misc_feature 1..21: note = Synthetic
  source 1..21: mol_type = other DNA
tggaagcactaggtgggcgga

SEQ ID NO: 15079 - DNA, 21 bp, synthetic construct
  misc_feature 1..21: note = Synthetic
  source 1..21: mol_type = other DNA
tggaagccgtcggggcacagg

SEQ ID NO: 15080 - DNA, 21 bp, synthetic construct
  misc_feature 1..21: note = Synthetic
  source 1..21: mol_type = other DNA
tggaagccttcctcacactgg

SEQ ID NO: 15081 - DNA, 21 bp, synthetic construct
  misc_feature 1..21: note = Synthetic
  source 1..21: mol_type = other DNA
tggaagctggcgggaccacag

SEQ ID NO: 15082 - DNA, 21 bp, synthetic construct
  misc_feature 1..21: note = Synthetic
  source 1..21: mol_type = other DNA
tggaagtgggtaggggtcggg

SEQ ID NO: 15083 - DNA, 21 bp, synthetic construct
  misc_feature 1..21: note = Synthetic
  source 1..21: mol_type = other DNA
tggaattcgtcagggcgacag

SEQ ID NO: 15084 - DNA, 21 bp, synthetic construct
  misc_feature 1..21: note = Synthetic
  source 1..21: mol_type = other DNA
tggacagagccctcacgctac

SEQ ID NO: 15085 - DNA, 21 bp, synthetic construct
  misc_feature 1..21: note = Synthetic
  source 1..21: mol_type = other DNA
tggacctcatcctctgtggtc

SEQ ID NO: 15086 - DNA, 21 bp, synthetic construct
  misc_feature 1..21: note = Synthetic
  source 1..21: mol_type = other DNA
tggagagaaactcaaaacttc

SEQ ID NO: 15087 - DNA, 21 bp, synthetic construct
  misc_feature 1..21: note = Synthetic
  source 1..21: mol_type = other DNA
tggagagaaatggaggtgtca

SEQ ID NO: 15088 - DNA, 21 bp, synthetic construct
  misc_feature 1..21: note = Synthetic
  source 1..21: mol_type = other DNA
tggagcccacagccttgcagg

SEQ ID NO: 15089 - DNA, 21 bp, synthetic construct
  misc_feature 1..21: note = Synthetic
  source 1..21: mol_type = other DNA
tggagccgttctccctgaata

SEQ ID NO: 15090 - DNA, 21 bp, synthetic construct
  misc_feature 1..21: note = Synthetic
  source 1..21: mol_type = other DNA
tggagctgacctttagcctga

SEQ ID NO: 15091 - DNA, 21 bp, synthetic construct
  misc_feature 1..21: note = Synthetic
  source 1..21: mol_type = other DNA
tggagctgttgcactggaagc

SEQ ID NO: 15092 - DNA, 21 bp, synthetic construct
  misc_feature 1..21: note = Synthetic
  source 1..21: mol_type = other DNA
tggaggatttatttatttttt

SEQ ID NO: 15093 - DNA, 21 bp, synthetic construct
  misc_feature 1..21: note = Synthetic
  source 1..21: mol_type = other DNA
tggaggcatttgcatagaagt

SEQ ID NO: 15094 - DNA, 21 bp, synthetic construct
  misc_feature 1..21: note = Synthetic
  source 1..21: mol_type = other DNA
tggaggtgtcatcctggtccc

SEQ ID NO: 15095 - DNA, 21 bp, synthetic construct
  misc_feature 1..21: note = Synthetic
  source 1..21: mol_type = other DNA
tggagtcaacccagtagaggc

SEQ ID NO: 15096 - DNA, 21 bp, synthetic construct
  misc_feature 1..21: note = Synthetic
  source 1..21: mol_type = other DNA
tggagtgaagtttggagtcaa

SEQ ID NO: 15097 - DNA, 21 bp, synthetic construct
  misc_feature 1..21: note = Synthetic
  source 1..21: mol_type = other DNA
tggagtgcagtggctcgatca

SEQ ID NO: 15098 - DNA, 21 bp, synthetic construct
  misc_feature 1..21: note = Synthetic
  source 1..21: mol_type = other DNA
tggagtggatgcactcgccac

SEQ ID NO: 15099 - DNA, 21 bp, synthetic construct
  misc_feature 1..21: note = Synthetic
  source 1..21: mol_type = other DNA
tggatccagtccacagccagc

SEQ ID NO: 15100 - DNA, 21 bp, synthetic construct
  misc_feature 1..21: note = Synthetic
  source 1..21: mol_type = other DNA
tggatgaggcagggccagggg

SEQ ID NO: 15101 - DNA, 21 bp, synthetic construct
  misc_feature 1..21: note = Synthetic
  source 1..21: mol_type = other DNA
tggatgcactcgccacttagg

SEQ ID NO: 15102 - DNA, 21 bp, synthetic construct
  misc_feature 1..21: note = Synthetic
  source 1..21: mol_type = other DNA
tggatgcagtttccatcagag

SEQ ID NO: 15103 - DNA, 21 bp, synthetic construct
  misc_feature 1..21: note = Synthetic
  source 1..21: mol_type = other DNA
tggatgtctcctgggtggcca

SEQ ID NO: 15104 - DNA, 21 bp, synthetic construct
  misc_feature 1..21: note = Synthetic
  source 1..21: mol_type = other DNA
tggatgtctctgctgatgacg

SEQ ID NO: 15105 - DNA, 21 bp, synthetic construct
  misc_feature 1..21: note = Synthetic
  source 1..21: mol_type = other DNA
tggcaaatgtggacctcatcc

SEQ ID NO: 15106 - DNA, 21 bp, synthetic construct
  misc_feature 1..21: note = Synthetic
  source 1..21: mol_type = other DNA
tggcactcagcgctgccatcg

SEQ ID NO: 15107 - DNA, 21 bp, synthetic construct
  misc_feature 1..21: note = Synthetic
  source 1..21: mol_type = other DNA
tggcactgaaaatggcttcgt

SEQ ID NO: 15108 - DNA, 21 bp, synthetic construct
  misc_feature 1..21: note = Synthetic
  source 1..21: mol_type = other DNA
tggcactggaactcgtttctt

SEQ ID NO: 15109 - DNA, 21 bp, synthetic construct
  misc_feature 1..21: note = Synthetic
  source 1..21: mol_type = other DNA
tggcacttgtagccaccctcc

SEQ ID NO: 15110 - DNA, 21 bp, synthetic construct
  misc_feature 1..21: note = Synthetic
  source 1..21: mol_type = other DNA
tggcagccgccattgctcagg

SEQ ID NO: 15111 - DNA, 21 bp, synthetic construct
  misc_feature 1..21: note = Synthetic
  source 1..21: mol_type = other DNA
tggcagcgaaactcgtcctgg

SEQ ID NO: 15112 - DNA, 21 bp, synthetic construct
  misc_feature 1..21: note = Synthetic
  source 1..21: mol_type = other DNA
tggcaggcaatgctttggtct

SEQ ID NO: 15113 - DNA, 21 bp, synthetic construct
  misc_feature 1..21: note = Synthetic
  source 1..21: mol_type = other DNA
tggcagttctcgatattcacg

SEQ ID NO: 15114 - DNA, 21 bp, synthetic construct
  misc_feature 1..21: note = Synthetic
  source 1..21: mol_type = other DNA
tggcataatcatagctcacga

SEQ ID NO: 15115 - DNA, 21 bp, synthetic construct
  misc_feature 1..21: note = Synthetic
  source 1..21: mol_type = other DNA
tggcatcatttggtgaatgag

SEQ ID NO: 15116 - DNA, 21 bp, synthetic construct
  misc_feature 1..21: note = Synthetic
  source 1..21: mol_type = other DNA
tggccaaattcattttttaag

SEQ ID NO: 15117 - DNA, 21 bp, synthetic construct
  misc_feature 1..21: note = Synthetic
  source 1..21: mol_type = other DNA
tggccacagcgcagttttcct

SEQ ID NO: 15118 - DNA, 21 bp, synthetic construct
  misc_feature 1..21: note = Synthetic
  source 1..21: mol_type = other DNA
tggccacaggacagccttgct

SEQ ID NO: 15119 - DNA, 21 bp, synthetic construct
  misc_feature 1..21: note = Synthetic
  source 1..21: mol_type = other DNA
tggccacctccgtgtccagag

SEQ ID NO: 15120 - DNA, 21 bp, synthetic construct
  misc_feature 1..21: note = Synthetic
  source 1..21: mol_type = other DNA
tggccactgcagcctcagcct

SEQ ID NO: 15121 - DNA, 21 bp, synthetic construct
  misc_feature 1..21: note = Synthetic
  source 1..21: mol_type = other DNA
tggccagaggccatgggctgc

SEQ ID NO: 15122 - DNA, 21 bp, synthetic construct
  misc_feature 1..21: note = Synthetic
  source 1..21: mol_type = other DNA
tggccagcagcatgccgtccg

SEQ ID NO: 15123 - DNA, 21 bp, synthetic construct
  misc_feature 1..21: note = Synthetic
  source 1..21: mol_type = other DNA
tggccatcgcacctccagaac

SEQ ID NO: 15124 - DNA, 21 bp, synthetic construct
  misc_feature 1..21: note = Synthetic
  source 1..21: mol_type = other DNA
tggccccaggcagccgggagg

SEQ ID NO: 15125 - DNA, 21 bp, synthetic construct
  misc_feature 1..21: note = Synthetic
  source 1..21: mol_type = other DNA
tggcccttggcttggagccgt

SEQ ID NO: 15126 - DNA, 21 bp, synthetic construct
  misc_feature 1..21: note = Synthetic
  source 1..21: mol_type = other DNA
tggccgggggcccctctgtga

SEQ ID NO: 15127 - DNA, 21 bp, synthetic construct
  misc_feature 1..21: note = Synthetic
  source 1..21: mol_type = other DNA
tggcctgggatcccatcccaa

SEQ ID NO: 15128 - DNA, 21 bp, synthetic construct
  misc_feature 1..21: note = Synthetic
  source 1..21: mol_type = other DNA
tggcgatggggaggacaatgg

SEQ ID NO: 15129 - DNA, 21 bp, synthetic construct
  misc_feature 1..21: note = Synthetic
  source 1..21: mol_type = other DNA
tggcgcaatctcggctcactg

SEQ ID NO: 15130 - DNA, 21 bp, synthetic construct
  misc_feature 1..21: note = Synthetic
  source 1..21: mol_type = other DNA
tggcgggaccacaggtgagca

SEQ ID NO: 15131 - DNA, 21 bp, synthetic construct
  misc_feature 1..21: note = Synthetic
  source 1..21: mol_type = other DNA
tggcgggagttccccagtcag

SEQ ID NO: 15132 - DNA, 21 bp, synthetic construct
  misc_feature 1..21: note = Synthetic
  source 1..21: mol_type = other DNA
tggctcactgcaacctccacc

SEQ ID NO: 15133 - DNA, 21 bp, synthetic construct
  misc_feature 1..21: note = Synthetic
  source 1..21: mol_type = other DNA
tggctcgatcatggctcactg

SEQ ID NO: 15134 - DNA, 21 bp, synthetic construct
  misc_feature 1..21: note = Synthetic
  source 1..21: mol_type = other DNA
tggctgaagatctcggctgca

SEQ ID NO: 15135 - DNA, 21 bp, synthetic construct
  misc_feature 1..21: note = Synthetic
  source 1..21: mol_type = other DNA
tggctgcaggtgtcgggatcc

SEQ ID NO: 15136 - DNA, 21 bp, synthetic construct
  misc_feature 1..21: note = Synthetic
  source 1..21: mol_type = other DNA
tggctgggtgaggttgtggaa

SEQ ID NO: 15137 - DNA, 21 bp, synthetic construct
  misc_feature 1..21: note = Synthetic
  source 1..21: mol_type = other DNA
tggctgtctagcaaggcttgc

SEQ ID NO: 15138 - DNA, 21 bp, synthetic construct
  misc_feature 1..21: note = Synthetic
  source 1..21: mol_type = other DNA
tggcttaaggaaggtacaaac

SEQ ID NO: 15139 - DNA, 21 bp, synthetic construct
  misc_feature 1..21: note = Synthetic
  source 1..21: mol_type = other DNA
tggcttagagattggtggatg

SEQ ID NO: 15140 - DNA, 21 bp, synthetic construct
  misc_feature 1..21: note = Synthetic
  source 1..21: mol_type = other DNA
tggcttcgttgatgatatctg

SEQ ID NO: 15141 - DNA, 21 bp, synthetic construct
  misc_feature 1..21: note = Synthetic
  source 1..21: mol_type = other DNA
tggcttggagccgttctccct

SEQ ID NO: 15142 - DNA, 21 bp, synthetic construct
  misc_feature 1..21: note = Synthetic
  source 1..21: mol_type = other DNA
tggcttggaggcatttgcata

SEQ ID NO: 15143 - DNA, 21 bp, synthetic construct
  misc_feature 1..21: note = Synthetic
  source 1..21: mol_type = other DNA
tgggaacagccgccgttgttg

SEQ ID NO: 15144 - DNA, 21 bp, synthetic construct
  misc_feature 1..21: note = Synthetic
  source 1..21: mol_type = other DNA
tgggaagtggcatcatttggt

SEQ ID NO: 15145 - DNA, 21 bp, synthetic construct
  misc_feature 1..21: note = Synthetic
  source 1..21: mol_type = other DNA
tgggacaggtcagaccagtag

SEQ ID NO: 15146 - DNA, 21 bp, synthetic construct
  misc_feature 1..21: note = Synthetic
  source 1..21: mol_type = other DNA
tgggactacaggtgcccgcca

SEQ ID NO: 15147 - DNA, 21 bp, synthetic construct
  misc_feature 1..21: note = Synthetic
  source 1..21: mol_type = other DNA
tgggactcatcagagccatcc

SEQ ID NO: 15148 - DNA, 21 bp, synthetic construct
  misc_feature 1..21: note = Synthetic
  source 1..21: mol_type = other DNA
tgggagcacgtcttgggggag

SEQ ID NO: 15149 - DNA, 21 bp, synthetic construct
  misc_feature 1..21: note = Synthetic
  source 1..21: mol_type = other DNA
tgggagcacgtcttgggggga

SEQ ID NO: 15150 - DNA, 21 bp, synthetic construct
  misc_feature 1..21: note = Synthetic
  source 1..21: mol_type = other DNA
tgggatcacaggcacgtgcca

SEQ ID NO: 15151 - DNA, 21 bp, synthetic construct
  misc_feature 1..21: note = Synthetic
  source 1..21: mol_type = other DNA
tgggatcccatcccaacacac

SEQ ID NO: 15152 - DNA, 21 bp, synthetic construct
  misc_feature 1..21: note = Synthetic
  source 1..21: mol_type = other DNA
tgggatctcgctttgttgctc

SEQ ID NO: 15153 - DNA, 21 bp, synthetic construct
  misc_feature 1..21: note = Synthetic
  source 1..21: mol_type = other DNA
tgggattacaggcgtgagcca

SEQ ID NO: 15154 - DNA, 21 bp, synthetic construct
  misc_feature 1..21: note = Synthetic
  source 1..21: mol_type = other DNA
tgggattacaggcgtgaggca

SEQ ID NO: 15155 - DNA, 21 bp, synthetic construct
  misc_feature 1..21: note = Synthetic
  source 1..21: mol_type = other DNA
tgggcaccaggctggtgtcct

SEQ ID NO: 15156 - DNA, 21 bp, synthetic construct
  misc_feature 1..21: note = Synthetic
  source 1..21: mol_type = other DNA
tgggcactgtccgaagcctgt

SEQ ID NO: 15157 - DNA, 21 bp, synthetic construct
  misc_feature 1..21: note = Synthetic
  source 1..21: mol_type = other DNA
tgggcagggacgggactccag

SEQ ID NO: 15158 - DNA, 21 bp, synthetic construct
  misc_feature 1..21: note = Synthetic
  source 1..21: mol_type = other DNA
tgggccaccagctggaagccg

SEQ ID NO: 15159 - DNA, 21 bp, synthetic construct
  misc_feature 1..21: note = Synthetic
  source 1..21: mol_type = other DNA
tgggccactgaatgttttcag

SEQ ID NO: 15160 - DNA, 21 bp, synthetic construct
  misc_feature 1..21: note = Synthetic
  source 1..21: mol_type = other DNA
tgggccagcctcttttcatcc

SEQ ID NO: 15161 - DNA, 21 bp, synthetic construct
  misc_feature 1..21: note = Synthetic
  source 1..21: mol_type = other DNA
tgggcctgacatcccctcccc

SEQ ID NO: 15162 - DNA, 21 bp, synthetic construct
  misc_feature 1..21: note = Synthetic
  source 1..21: mol_type = other DNA
tgggcgagtgggggttgatct

SEQ ID NO: 15163 - DNA, 21 bp, synthetic construct
  misc_feature 1..21: note = Synthetic
  source 1..21: mol_type = other DNA
tgggcggacataaagacgaca

SEQ ID NO: 15164 - DNA, 21 bp, synthetic construct
  misc_feature 1..21: note = Synthetic
  source 1..21: mol_type = other DNA
tgggctcaggcgatcctcctg

SEQ ID NO: 15165 - DNA, 21 bp, synthetic construct
  misc_feature 1..21: note = Synthetic
  source 1..21: mol_type = other DNA
tgggctctgtcaagctgggtg

SEQ ID NO: 15166 - DNA, 21 bp, synthetic construct
  misc_feature 1..21: note = Synthetic
  source 1..21: mol_type = other DNA
tgggctgctgatgcaccatgc

SEQ ID NO: 15167 - DNA, 21 bp, synthetic construct
  misc_feature 1..21: note = Synthetic
  source 1..21: mol_type = other DNA
tgggcttcttctcatttcctc

SEQ ID NO: 15168 - DNA, 21 bp, synthetic construct
  misc_feature 1..21: note = Synthetic
  source 1..21: mol_type = other DNA
tggggaagtgaatggcttgga

SEQ ID NO: 15169 - DNA, 21 bp, synthetic construct
  misc_feature 1..21: note = Synthetic
  source 1..21: mol_type = other DNA
tggggacaattgccaatccct

SEQ ID NO: 15170 - DNA, 21 bp, synthetic construct
  misc_feature 1..21: note = Synthetic
  source 1..21: mol_type = other DNA
tggggacagtaggttttcagc

SEQ ID NO: 15171 - DNA, 21 bp, synthetic construct
  misc_feature 1..21: note = Synthetic
  source 1..21: mol_type = other DNA
tggggacggaggtgtcgccac

SEQ ID NO: 15172 - DNA, 21 bp, synthetic construct
  misc_feature 1..21: note = Synthetic
  source 1..21: mol_type = other DNA
tggggaggacaatggacagag

SEQ ID NO: 15173 - DNA, 21 bp, synthetic construct
  misc_feature 1..21: note = Synthetic
  source 1..21: mol_type = other DNA
tggggatgaggctggtgtact

SEQ ID NO: 15174 - DNA, 21 bp, synthetic construct
  misc_feature 1..21: note = Synthetic
  source 1..21: mol_type = other DNA
tggggcgagggcgccccccag

SEQ ID NO: 15175 - DNA, 21 bp, synthetic construct
  misc_feature 1..21: note = Synthetic
  source 1..21: mol_type = other DNA
tgggggagcacgtctcctggg

SEQ ID NO: 15176 - DNA, 21 bp, synthetic construct
  misc_feature 1..21: note = Synthetic
  source 1..21: mol_type = other DNA
tgggggatgcaggtggagctg

SEQ ID NO: 15177 - DNA, 21 bp, synthetic construct
  misc_feature 1..21: note = Synthetic
  source 1..21: mol_type = other DNA
tggggggacagccttgctcgt

SEQ ID NO: 15178 - DNA, 21 bp, synthetic construct
  misc_feature 1..21: note = Synthetic
  source 1..21: mol_type = other DNA
tgggggggacacagtgttttg

SEQ ID NO: 15179 - DNA, 21 bp, synthetic construct
  misc_feature 1..21: note = Synthetic
  source 1..21: mol_type = other DNA
tgggggtccagctggaagcct

SEQ ID NO: 15180 - DNA, 21 bp, synthetic construct
  misc_feature 1..21: note = Synthetic
  source 1..21: mol_type = other DNA
tgggggttgatctgcggggca

SEQ ID NO: 15181 - DNA, 21 bp, synthetic construct
  misc_feature 1..21: note = Synthetic
  source 1..21: mol_type = other DNA
tggggtcttactatgttgccc

SEQ ID NO: 15182 - DNA, 21 bp, synthetic construct
  misc_feature 1..21: note = Synthetic
  source 1..21: mol_type = other DNA
tgggtaggggtcgggaggatg

SEQ ID NO: 15183 - DNA, 21 bp, synthetic construct
  misc_feature 1..21: note = Synthetic
  source 1..21: mol_type = other DNA
tgggtcatgattcgggggtga

SEQ ID NO: 15184 - DNA, 21 bp, synthetic construct
  misc_feature 1..21: note = Synthetic
  source 1..21: mol_type = other DNA
tgggtccctcgcagagtgtca

SEQ ID NO: 15185 - DNA, 21 bp, synthetic construct
  misc_feature 1..21: note = Synthetic
  source 1..21: mol_type = other DNA
tgggtgaggttgtggaagaga

SEQ ID NO: 15186 - DNA, 21 bp, synthetic construct
  misc_feature 1..21: note = Synthetic
  source 1..21: mol_type = other DNA
tgggtgcaggccacgtgtcct

SEQ ID NO: 15187 - DNA, 21 bp, synthetic construct
  misc_feature 1..21: note = Synthetic
  source 1..21: mol_type = other DNA
tgggtgctgcagatcattctc

SEQ ID NO: 15188 - DNA, 21 bp, synthetic construct
  misc_feature 1..21: note = Synthetic
  source 1..21: mol_type = other DNA
tgggtggccactgcagcctca

SEQ ID NO: 15189 - DNA, 21 bp, synthetic construct
  misc_feature 1..21: note = Synthetic
  source 1..21: mol_type = other DNA
tgggtgggtcatgattcgggg

SEQ ID NO: 15190 - DNA, 21 bp, synthetic construct
  misc_feature 1..21: note = Synthetic
  source 1..21: mol_type = other DNA
tgggttcatctgaccagtccc

SEQ ID NO: 15191 - DNA, 21 bp, synthetic construct
  misc_feature 1..21: note = Synthetic
  source 1..21: mol_type = other DNA
tggtatccgcaacagagacag

SEQ ID NO: 15192 - DNA, 21 bp, synthetic construct
  misc_feature 1..21: note = Synthetic
  source 1..21: mol_type = other DNA
tggtccccccgggcctgtttc

SEQ ID NO: 15193 - DNA, 21 bp, synthetic construct
  misc_feature 1..21: note = Synthetic
  source 1..21: mol_type = other DNA
tggtcccgcactctttgatgg

SEQ ID NO: 15194 - DNA, 21 bp, synthetic construct
  misc_feature 1..21: note = Synthetic
  source 1..21: mol_type = other DNA
tggtcctctcacaccagttca

SEQ ID NO: 15195 - DNA, 21 bp, synthetic construct
  misc_feature 1..21: note = Synthetic
  source 1..21: mol_type = other DNA
tggtctccaactcctgaactc

SEQ ID NO: 15196 - DNA, 21 bp, synthetic construct
  misc_feature 1..21: note = Synthetic
  source 1..21: mol_type = other DNA
tggtctcgatctcctgacctc

SEQ ID NO: 15197 - DNA, 21 bp, synthetic construct
  misc_feature 1..21: note = Synthetic
  source 1..21: mol_type = other DNA
tggtctcggtgccaccacgga

SEQ ID NO: 15198 - DNA, 21 bp, synthetic construct
  misc_feature 1..21: note = Synthetic
  source 1..21: mol_type = other DNA
tggtcttccggttgcccccgt

SEQ ID NO: 15199 - DNA, 21 bp, synthetic construct
  misc_feature 1..21: note = Synthetic
  source 1..21: mol_type = other DNA
tggtcttctctgtctttgaat

SEQ ID NO: 15200 - DNA, 21 bp, synthetic construct
  misc_feature 1..21: note = Synthetic
  source 1..21: mol_type = other DNA
tggtcttctgatagacggggt

SEQ ID NO: 15201 - DNA, 21 bp, synthetic construct
  misc_feature 1..21: note = Synthetic
  source 1..21: mol_type = other DNA
tggtgaagaagaggtaggcga

SEQ ID NO: 15202 - DNA, 21 bp, synthetic construct
  misc_feature 1..21: note = Synthetic
  source 1..21: mol_type = other DNA
tggtgaatgagtttggtctcg

SEQ ID NO: 15203 - DNA, 21 bp, synthetic construct
  misc_feature 1..21: note = Synthetic
  source 1..21: mol_type = other DNA
tggtgagacattgtcactatc

SEQ ID NO: 15204 - DNA, 21 bp, synthetic construct
  misc_feature 1..21: note = Synthetic
  source 1..21: mol_type = other DNA
tggtgagcccaggggtggccc

SEQ ID NO: 15205 - DNA, 21 bp, synthetic construct
  misc_feature 1..21: note = Synthetic
  source 1..21: mol_type = other DNA
tggtgccatctgctgttgtgt

SEQ ID NO: 15206 - DNA, 21 bp, synthetic construct
  misc_feature 1..21: note = Synthetic
  source 1..21: mol_type = other DNA
tggtggatgaggcagggccag

SEQ ID NO: 15207 - DNA, 21 bp, synthetic construct
  misc_feature 1..21: note = Synthetic
  source 1..21: mol_type = other DNA
tggtggggcgagggcgccccc

SEQ ID NO: 15208 - DNA, 21 bp, synthetic construct
  misc_feature 1..21: note = Synthetic
  source 1..21: mol_type = other DNA
tggtgtactcgctccggtcca

SEQ ID NO: 15209 - DNA, 21 bp, synthetic construct
  misc_feature 1..21: note = Synthetic
  source 1..21: mol_type = other DNA
tggtgtcctgacagccacacc

SEQ ID NO: 15210 - DNA, 21 bp, synthetic construct
  misc_feature 1..21: note = Synthetic
  source 1..21: mol_type = other DNA
tggttgtggcaaatgtggacc

SEQ ID NO: 15211 - DNA, 21 bp, synthetic construct
  misc_feature 1..21: note = Synthetic
  source 1..21: mol_type = other DNA
tggttgtgtgctgtgtcctta

SEQ ID NO: 15212 - DNA, 21 bp, synthetic construct
  misc_feature 1..21: note = Synthetic
  source 1..21: mol_type = other DNA
tggtttaaaaagtgacaccca

SEQ ID NO: 15213 - DNA, 21 bp, synthetic construct
  misc_feature 1..21: note = Synthetic
  source 1..21: mol_type = other DNA
tggtttttgtagagatgggat

SEQ ID NO: 15214 - DNA, 21 bp, synthetic construct
  misc_feature 1..21: note = Synthetic
  source 1..21: mol_type = other DNA
tggtttttttttgtttttttt

SEQ ID NO: 15215 - DNA, 21 bp, synthetic construct
  misc_feature 1..21: note = Synthetic
  source 1..21: mol_type = other DNA
tgtacaactctgaactgagaa

SEQ ID NO: 15216 - DNA, 21 bp, synthetic construct
  misc_feature 1..21: note = Synthetic
  source 1..21: mol_type = other DNA
tgtacacagtgtacaactctg

SEQ ID NO: 15217 - DNA, 21 bp, synthetic construct
  misc_feature 1..21: note = Synthetic
  source 1..21: mol_type = other DNA
tgtacagggacgcatttacgt

SEQ ID NO: 15218 - DNA, 21 bp, synthetic construct
  misc_feature 1..21: note = Synthetic
  source 1..21: mol_type = other DNA
tgtacataaagaagaggcatt

SEQ ID NO: 15219 - DNA, 21 bp, synthetic construct
  misc_feature 1..21: note = Synthetic
  source 1..21: mol_type = other DNA
tgtactcgctccggtccagcg

SEQ ID NO: 15220 - DNA, 21 bp, synthetic construct
  misc_feature 1..21: note = Synthetic
  source 1..21: mol_type = other DNA
tgtagagatgggatctcgctt

SEQ ID NO: 15221 - DNA, 21 bp, synthetic construct
  misc_feature 1..21: note = Synthetic
  source 1..21: mol_type = other DNA
tgtagccaccctccaggttca

SEQ ID NO: 15222 - DNA, 21 bp, synthetic construct
  misc_feature 1..21: note = Synthetic
  source 1..21: mol_type = other DNA
tgtagccgtcctggttgtggc

SEQ ID NO: 15223 - DNA, 21 bp, synthetic construct
  misc_feature 1..21: note = Synthetic
  source 1..21: mol_type = other DNA
tgtaggagatgcatttcccgt

SEQ ID NO: 15224 - DNA, 21 bp, synthetic construct
  misc_feature 1..21: note = Synthetic
  source 1..21: mol_type = other DNA
tgtagggagaggcacgctctg

SEQ ID NO: 15225 - DNA, 21 bp, synthetic construct
  misc_feature 1..21: note = Synthetic
  source 1..21: mol_type = other DNA
tgtatatatatatatataagt

SEQ ID NO: 15226 - DNA, 21 bp, synthetic construct
  misc_feature 1..21: note = Synthetic
  source 1..21: mol_type = other DNA
tgtatgtcgcggaggcggctc

SEQ ID NO: 15227 - DNA, 21 bp, synthetic construct
  misc_feature 1..21: note = Synthetic
  source 1..21: mol_type = other DNA
tgtatttctgaaatagggtct

SEQ ID NO: 15228 - DNA, 21 bp, synthetic construct
  misc_feature 1..21: note = Synthetic
  source 1..21: mol_type = other DNA
tgtatttttagtagagacggg

SEQ ID NO: 15229 - DNA, 21 bp, synthetic construct
  misc_feature 1..21: note = Synthetic
  source 1..21: mol_type = other DNA
tgtcaaagttgatgctgttga

SEQ ID NO: 15230 - DNA, 21 bp, synthetic construct
  misc_feature 1..21: note = Synthetic
  source 1..21: mol_type = other DNA
tgtcaagctgggtgctgcaga

SEQ ID NO: 15231 - DNA, 21 bp, synthetic construct
  misc_feature 1..21: note = Synthetic
  source 1..21: mol_type = other DNA
tgtcacacagctgcccccgag

SEQ ID NO: 15232 - DNA, 21 bp, synthetic construct
  misc_feature 1..21: note = Synthetic
  source 1..21: mol_type = other DNA
tgtcacattaacgcagccaac

SEQ ID NO: 15233 - DNA, 21 bp, synthetic construct
  misc_feature 1..21: note = Synthetic
  source 1..21: mol_type = other DNA
tgtcacggtggagagaaactc

SEQ ID NO: 15234 - DNA, 21 bp, synthetic construct
  misc_feature 1..21: note = Synthetic
  source 1..21: mol_type = other DNA
tgtcactatctccaccgtggt

SEQ ID NO: 15235 - DNA, 21 bp, synthetic construct
  misc_feature 1..21: note = Synthetic
  source 1..21: mol_type = other DNA
tgtcactgtctctccggacat

SEQ ID NO: 15236 - DNA, 21 bp, synthetic construct
  misc_feature 1..21: note = Synthetic
  source 1..21: mol_type = other DNA
tgtcagacagccttgctcgtc

SEQ ID NO: 15237 - DNA, 21 bp, synthetic construct
  misc_feature 1..21: note = Synthetic
  source 1..21: mol_type = other DNA
tgtcataggaagagacgccgt

SEQ ID NO: 15238 - DNA, 21 bp, synthetic construct
  misc_feature 1..21: note = Synthetic
  source 1..21: mol_type = other DNA
tgtcatcctggtccccccggg

SEQ ID NO: 15239 - DNA, 21 bp, synthetic construct
  misc_feature 1..21: note = Synthetic
  source 1..21: mol_type = other DNA
tgtccaaaatactttgtcctc

SEQ ID NO: 15240 - DNA, 21 bp, synthetic construct
  misc_feature 1..21: note = Synthetic
  source 1..21: mol_type = other DNA
tgtccaagcattcgttggtcc

SEQ ID NO: 15241 - DNA, 21 bp, synthetic construct
  misc_feature 1..21: note = Synthetic
  source 1..21: mol_type = other DNA
tgtccacaccattcaggcccc

SEQ ID NO: 15242 - DNA, 21 bp, synthetic construct
  misc_feature 1..21: note = Synthetic
  source 1..21: mol_type = other DNA
tgtccagagcgaccacgttcc

SEQ ID NO: 15243 - DNA, 21 bp, synthetic construct
  misc_feature 1..21: note = Synthetic
  source 1..21: mol_type = other DNA
tgtccagggtgatgcattcgc

SEQ ID NO: 15244 - DNA, 21 bp, synthetic construct
  misc_feature 1..21: note = Synthetic
  source 1..21: mol_type = other DNA
tgtccccggcattcattgaca

SEQ ID NO: 15245 - DNA, 21 bp, synthetic construct
  misc_feature 1..21: note = Synthetic
  source 1..21: mol_type = other DNA
tgtccccttggaacacgtaaa

SEQ ID NO: 15246 - DNA, 21 bp, synthetic construct
  misc_feature 1..21: note = Synthetic
  source 1..21: mol_type = other DNA
tgtcccgacccggatcacgac

SEQ ID NO: 15247 - DNA, 21 bp, synthetic construct
  misc_feature 1..21: note = Synthetic
  source 1..21: mol_type = other DNA
tgtccctggccagcagcatgc

SEQ ID NO: 15248 - DNA, 21 bp, synthetic construct
  misc_feature 1..21: note = Synthetic
  source 1..21: mol_type = other DNA
tgtccctggggacaattgcca

SEQ ID NO: 15249 - DNA, 21 bp, synthetic construct
  misc_feature 1..21: note = Synthetic
  source 1..21: mol_type = other DNA
tgtccgaagcctgttctgcct

SEQ ID NO: 15250 - DNA, 21 bp, synthetic construct
  misc_feature 1..21: note = Synthetic
  source 1..21: mol_type = other DNA
tgtcctagctggaaaccctgg

SEQ ID NO: 15251 - DNA, 21 bp, synthetic construct
  misc_feature 1..21: note = Synthetic
  source 1..21: mol_type = other DNA
tgtcctcaaagacggccaagg

SEQ ID NO: 15252 - DNA, 21 bp, synthetic construct
  misc_feature 1..21: note = Synthetic
  source 1..21: mol_type = other DNA
tgtcctcacggccaaggtaac

SEQ ID NO: 15253 - DNA, 21 bp, synthetic construct
  misc_feature 1..21: note = Synthetic
  source 1..21: mol_type = other DNA
tgtcctgacagccacacctgg

SEQ ID NO: 15254 - DNA, 21 bp, synthetic construct
  misc_feature 1..21: note = Synthetic
  source 1..21: mol_type = other DNA
tgtccttacggctgtggagct

SEQ ID NO: 15255 - DNA, 21 bp, synthetic construct
  misc_feature 1..21: note = Synthetic
  source 1..21: mol_type = other DNA
tgtccttgcagtcatattccc

SEQ ID NO: 15256 - DNA, 21 bp, synthetic construct
  misc_feature 1..21: note = Synthetic
  source 1..21: mol_type = other DNA
tgtccttgcagtcggggccac

SEQ ID NO: 15257 - DNA, 21 bp, synthetic construct
  misc_feature 1..21: note = Synthetic
  source 1..21: mol_type = other DNA
tgtcgcaggcccacagctggg

SEQ ID NO: 15258 - DNA, 21 bp, synthetic construct
  misc_feature 1..21: note = Synthetic
  source 1..21: mol_type = other DNA
tgtcgcagtccacttggccat

SEQ ID NO: 15259 - DNA, 21 bp, synthetic construct
  misc_feature 1..21: note = Synthetic
  source 1..21: mol_type = other DNA
tgtcgccacagagcacagcgg

SEQ ID NO: 15260 - DNA, 21 bp, synthetic construct
  misc_feature 1..21: note = Synthetic
  source 1..21: mol_type = other DNA
tgtcgcccacgtggctgaaga

SEQ ID NO: 15261 - DNA, 21 bp, synthetic construct
  misc_feature 1..21: note = Synthetic
  source 1..21: mol_type = other DNA
tgtcgcccactgcagtccccg

SEQ ID NO: 15262 - DNA, 21 bp, synthetic construct
  misc_feature 1..21: note = Synthetic
  source 1..21: mol_type = other DNA
tgtcgcccaggccagactgcg

SEQ ID NO: 15263 - DNA, 21 bp, synthetic construct
  misc_feature 1..21: note = Synthetic
  source 1..21: mol_type = other DNA
tgtcgcggaggcggctccggg

SEQ ID NO: 15264 - DNA, 21 bp, synthetic construct
  misc_feature 1..21: note = Synthetic
  source 1..21: mol_type = other DNA
tgtcgggaacaggtcgggtgg

SEQ ID NO: 15265 - DNA, 21 bp, synthetic construct
  misc_feature 1..21: note = Synthetic
  source 1..21: mol_type = other DNA
tgtcgggatcctgacactcat

SEQ ID NO: 15266 - DNA, 21 bp, synthetic construct
  misc_feature 1..21: note = Synthetic
  source 1..21: mol_type = other DNA
tgtcgtcgcctttgtgacagg

SEQ ID NO: 15267 - DNA, 21 bp, synthetic construct
  misc_feature 1..21: note = Synthetic
  source 1..21: mol_type = other DNA
tgtctagcaaggcttgcatag

SEQ ID NO: 15268 - DNA, 21 bp, synthetic construct
  misc_feature 1..21: note = Synthetic
  source 1..21: mol_type = other DNA
tgtctcaggcacttaataaat

SEQ ID NO: 15269 - DNA, 21 bp, synthetic construct
  misc_feature 1..21: note = Synthetic
  source 1..21: mol_type = other DNA
tgtctcctgggtggccactgc

SEQ ID NO: 15270 - DNA, 21 bp, synthetic construct
  misc_feature 1..21: note = Synthetic
  source 1..21: mol_type = other DNA
tgtctcgaggggtagctgtag

SEQ ID NO: 15271 - DNA, 21 bp, synthetic construct
  misc_feature 1..21: note = Synthetic
  source 1..21: mol_type = other DNA
tgtctctccggacatcagtgc

SEQ ID NO: 15272 - DNA, 21 bp, synthetic construct
  misc_feature 1..21: note = Synthetic
  source 1..21: mol_type = other DNA
tgtctctgctgatgacggtgt

SEQ ID NO: 15273 - DNA, 21 bp, synthetic construct
  misc_feature 1..21: note = Synthetic
  source 1..21: mol_type = other DNA
tgtctggccaaattcattttt

SEQ ID NO: 15274 - DNA, 21 bp, synthetic construct
  misc_feature 1..21: note = Synthetic
  source 1..21: mol_type = other DNA
tgtctttgaataaaacaaggc

SEQ ID NO: 15275 - DNA, 21 bp, synthetic construct
  misc_feature 1..21: note = Synthetic
  source 1..21: mol_type = other DNA
tgtgaacttgatcggggctgg

SEQ ID NO: 15276 - DNA, 21 bp, synthetic construct
  misc_feature 1..21: note = Synthetic
  source 1..21: mol_type = other DNA
tgtgacacttgaacttgttgg

SEQ ID NO: 15277 - DNA, 21 bp, synthetic construct
  misc_feature 1..21: note = Synthetic
  source 1..21: mol_type = other DNA
tgtgacaggaaccgcggagga

SEQ ID NO: 15278 - DNA, 21 bp, synthetic construct
  misc_feature 1..21: note = Synthetic
  source 1..21: mol_type = other DNA
tgtgacatcttcacgcgggag

SEQ ID NO: 15279 - DNA, 21 bp, synthetic construct
  misc_feature 1..21: note = Synthetic
  source 1..21: mol_type = other DNA
tgtgaggcagctcctcatgtc

SEQ ID NO: 15280 - DNA, 21 bp, synthetic construct
  misc_feature 1..21: note = Synthetic
  source 1..21: mol_type = other DNA
tgtgaggcggttggcactgaa

SEQ ID NO: 15281 - DNA, 21 bp, synthetic construct
  misc_feature 1..21: note = Synthetic
  source 1..21: mol_type = other DNA
tgtgctgtgtccttacggctg

SEQ ID NO: 15282 - DNA, 21 bp, synthetic construct
  misc_feature 1..21: note = Synthetic
  source 1..21: mol_type = other DNA
tgtggaagagaaccatatcct

SEQ ID NO: 15283 - DNA, 21 bp, synthetic construct
  misc_feature 1..21: note = Synthetic
  source 1..21: mol_type = other DNA
tgtggacctcatcctctgtgg

SEQ ID NO: 15284 - DNA, 21 bp, synthetic construct
  misc_feature 1..21: note = Synthetic
  source 1..21: mol_type = other DNA
tgtggagctgacctttagcct

SEQ ID NO: 15285 - DNA, 21 bp, synthetic construct
  misc_feature 1..21: note = Synthetic
  source 1..21: mol_type = other DNA
tgtggatccagtccacagcca

SEQ ID NO: 15286 - DNA, 21 bp, synthetic construct
  misc_feature 1..21: note = Synthetic
  source 1..21: mol_type = other DNA
tgtggcaaatgtggacctcat

SEQ ID NO: 15287 - DNA, 21 bp, synthetic construct
  misc_feature 1..21: note = Synthetic
  source 1..21: mol_type = other DNA
tgtgggggtccagctggaagc

SEQ ID NO: 15288 - DNA, 21 bp, synthetic construct
  misc_feature 1..21: note = Synthetic
  source 1..21: mol_type = other DNA
tgtggtcttctgatagacggg

SEQ ID NO: 15289 - DNA, 21 bp, synthetic construct
  misc_feature 1..21: note = Synthetic
  source 1..21: mol_type = other DNA
tgtgtatatatatatatataa

SEQ ID NO: 15290 - DNA, 21 bp, synthetic construct
  misc_feature 1..21: note = Synthetic
  source 1..21: mol_type = other DNA
tgtgtcacggtggagagaaac

SEQ ID NO: 15291 - DNA, 21 bp, synthetic construct
  misc_feature 1..21: note = Synthetic
  source 1..21: mol_type = other DNA
tgtgtcctagctggaaaccct

SEQ ID NO: 15292 - DNA, 21 bp, synthetic construct
  misc_feature 1..21: note = Synthetic
  source 1..21: mol_type = other DNA
tgtgtccttacggctgtggag

SEQ ID NO: 15293 - DNA, 21 bp, synthetic construct
  misc_feature 1..21: note = Synthetic
  source 1..21: mol_type = other DNA
tgtgtctggccaaattcattt

SEQ ID NO: 15294 - DNA, 21 bp, synthetic construct
  misc_feature 1..21: note = Synthetic
  source 1..21: mol_type = other DNA
tgtgtgctgtgtccttacggc

SEQ ID NO: 15295 - DNA, 21 bp, synthetic construct
  misc_feature 1..21: note = Synthetic
  source 1..21: mol_type = other DNA
tgtgtgtatatatatatatat

SEQ ID NO: 15296 - DNA, 21 bp, synthetic construct
  misc_feature 1..21: note = Synthetic
  source 1..21: mol_type = other DNA
tgtgtgttgaaagccacttgc

SEQ ID NO: 15297 - DNA, 21 bp, synthetic construct
  misc_feature 1..21: note = Synthetic
  source 1..21: mol_type = other DNA
tgtgttgaaagccacttgctt

SEQ ID NO: 15298 - DNA, 21 bp, synthetic construct
  misc_feature 1..21: note = Synthetic
  source 1..21: mol_type = other DNA
tgttagccaggatggtctcga

SEQ ID NO: 15299 - DNA, 21 bp, synthetic construct
  misc_feature 1..21: note = Synthetic
  source 1..21: mol_type = other DNA
tgttcacgccacgtcatcctc

SEQ ID NO: 15300 - DNA, 21 bp, synthetic construct
  misc_feature 1..21: note = Synthetic
  source 1..21: mol_type = other DNA
tgttctgcctcccagatgaat

SEQ ID NO: 15301 - DNA, 21 bp, synthetic construct
  misc_feature 1..21: note = Synthetic
  source 1..21: mol_type = other DNA
tgttcttaagccgccagttct

SEQ ID NO: 15302 - DNA, 21 bp, synthetic construct
  misc_feature 1..21: note = Synthetic
  source 1..21: mol_type = other DNA
tgttgaaagccacttgcttct

SEQ ID NO: 15303 - DNA, 21 bp, synthetic construct
  misc_feature 1..21: note = Synthetic
  source 1..21: mol_type = other DNA
tgttgatgttcttaagccgcc

SEQ ID NO: 15304 - DNA, 21 bp, synthetic construct
  misc_feature 1..21: note = Synthetic
  source 1..21: mol_type = other DNA
tgttgcactggaagctggcgg

SEQ ID NO: 15305 - DNA, 21 bp, synthetic construct
  misc_feature 1..21: note = Synthetic
  source 1..21: mol_type = other DNA
tgttgcagactttgtccaggg

SEQ ID NO: 15306 - DNA, 21 bp, synthetic construct
  misc_feature 1..21: note = Synthetic
  source 1..21: mol_type = other DNA
tgttgcccaggctggaaagca

SEQ ID NO: 15307 - DNA, 21 bp, synthetic construct
  misc_feature 1..21: note = Synthetic
  source 1..21: mol_type = other DNA
tgttgcccaggctggagtgca

SEQ ID NO: 15308 - DNA, 21 bp, synthetic construct
  misc_feature 1..21: note = Synthetic
  source 1..21: mol_type = other DNA
tgttgctcaggcctggtctcc

SEQ ID NO: 15309 - DNA, 21 bp, synthetic construct
  misc_feature 1..21: note = Synthetic
  source 1..21: mol_type = other DNA
tgttgctgtggatccagtcca

SEQ ID NO: 15310 - DNA, 21 bp, synthetic construct
  misc_feature 1..21: note = Synthetic
  source 1..21: mol_type = other DNA
tgttgggtccctcgcagagtg

SEQ ID NO: 15311 - DNA, 21 bp, synthetic construct
  misc_feature 1..21: note = Synthetic
  source 1..21: mol_type = other DNA
tgttgtccaagcattcgttgg

SEQ ID NO: 15312 - DNA, 21 bp, synthetic construct
  misc_feature 1..21: note = Synthetic
  source 1..21: mol_type = other DNA
tgttgtgtgttgaaagccact

SEQ ID NO: 15313 - DNA, 21 bp, synthetic construct
  misc_feature 1..21: note = Synthetic
  source 1..21: mol_type = other DNA
tgtttctcttatccttcacga

SEQ ID NO: 15314 - DNA, 21 bp, synthetic construct
  misc_feature 1..21: note = Synthetic
  source 1..21: mol_type = other DNA
tgtttgaggattgtgtcacgg

SEQ ID NO: 15315 - DNA, 21 bp, synthetic construct
  misc_feature 1..21: note = Synthetic
  source 1..21: mol_type = other DNA
tgttttaaacacatacccatc

SEQ ID NO: 15316 - DNA, 21 bp, synthetic construct
  misc_feature 1..21: note = Synthetic
  source 1..21: mol_type = other DNA
tgttttcagtcaccagcgagt

SEQ ID NO: 15317 - DNA, 21 bp, synthetic construct
  misc_feature 1..21: note = Synthetic
  source 1..21: mol_type = other DNA
tgttttgtccctggggacaat

SEQ ID NO: 15318 - DNA, 21 bp, synthetic construct
  misc_feature 1..21: note = Synthetic
  source 1..21: mol_type = other DNA
tgttttttttttttgagacgg

SEQ ID NO: 15319 - DNA, 21 bp, synthetic construct
  misc_feature 1..21: note = Synthetic
  source 1..21: mol_type = other DNA
ttaaaaagtgacacccatctc

SEQ ID NO: 15320 - DNA, 21 bp, synthetic construct
  misc_feature 1..21: note = Synthetic
  source 1..21: mol_type = other DNA
ttaaacacatacccatcaacg

SEQ ID NO: 15321 - DNA, 21 bp, synthetic construct
  misc_feature 1..21: note = Synthetic
  source 1..21: mol_type = other DNA
ttaacgcagccaacttcatcg

SEQ ID NO: 15322 - DNA, 21 bp, synthetic construct
  misc_feature 1..21: note = Synthetic
  source 1..21: mol_type = other DNA
ttaactttttggtttttgtag

SEQ ID NO: 15323 - DNA, 21 bp, synthetic construct
  misc_feature 1..21: note = Synthetic
  source 1..21: mol_type = other DNA
ttaagaaatttaattgatcac

SEQ ID NO: 15324 - DNA, 21 bp, synthetic construct
  misc_feature 1..21: note = Synthetic
  source 1..21: mol_type = other DNA
ttaagagatggggtcttacta

SEQ ID NO: 15325 - DNA, 21 bp, synthetic construct
  misc_feature 1..21: note = Synthetic
  source 1..21: mol_type = other DNA
ttaagccgccagttcttccat

SEQ ID NO: 15326 - DNA, 21 bp, synthetic construct
  misc_feature 1..21: note = Synthetic
  source 1..21: mol_type = other DNA
ttaaggaaggtacaaacccac

SEQ ID NO: 15327 - DNA, 21 bp, synthetic construct
  misc_feature 1..21: note = Synthetic
  source 1..21: mol_type = other DNA
ttaagggtgaccagtgactca

SEQ ID NO: 15328 - DNA, 21 bp, synthetic construct
  misc_feature 1..21: note = Synthetic
  source 1..21: mol_type = other DNA
ttaaggtcattgcagacgtgg

SEQ ID NO: 15329 - DNA, 21 bp, synthetic construct
  misc_feature 1..21: note = Synthetic
  source 1..21: mol_type = other DNA
ttaataaatattaagggtgac

SEQ ID NO: 15330 - DNA, 21 bp, synthetic construct
  misc_feature 1..21: note = Synthetic
  source 1..21: mol_type = other DNA
ttaattgatcacagtaagaca

SEQ ID NO: 15331 - DNA, 21 bp, synthetic construct
  misc_feature 1..21: note = Synthetic
  source 1..21: mol_type = other DNA
ttacaggcgtgagccactgcg

SEQ ID NO: 15332 - DNA, 21 bp, synthetic construct
  misc_feature 1..21: note = Synthetic
  source 1..21: mol_type = other DNA
ttacaggcgtgaggcacctgt

SEQ ID NO: 15333 - DNA, 21 bp, synthetic construct
  misc_feature 1..21: note = Synthetic
  source 1..21: mol_type = other DNA
ttacggctgtggagctgacct

SEQ ID NO: 15334 - DNA, 21 bp, synthetic construct
  misc_feature 1..21: note = Synthetic
  source 1..21: mol_type = other DNA
ttacgtgctccgaaaccagaa

SEQ ID NO: 15335 - DNA, 21 bp, synthetic construct
  misc_feature 1..21: note = Synthetic
  source 1..21: mol_type = other DNA
ttactatgttgcccaggctgg

SEQ ID NO: 15336 - DNA, 21 bp, synthetic construct
  misc_feature 1..21: note = Synthetic
  source 1..21: mol_type = other DNA
ttagagattggtggatgaggc

SEQ ID NO: 15337 - DNA, 21 bp, synthetic construct
  misc_feature 1..21: note = Synthetic
  source 1..21: mol_type = other DNA
ttagccaggatggtctcgatc

SEQ ID NO: 15338 - DNA, 21 bp, synthetic construct
  misc_feature 1..21: note = Synthetic
  source 1..21: mol_type = other DNA
ttagcctgacggtggatgtct

SEQ ID NO: 15339 - DNA, 21 bp, synthetic construct
  misc_feature 1..21: note = Synthetic
  source 1..21: mol_type = other DNA
ttaggcagtggaactcgaagg

SEQ ID NO: 15340 - DNA, 21 bp, synthetic construct
  misc_feature 1..21: note = Synthetic
  source 1..21: mol_type = other DNA
ttaggggtttggcttagagat

SEQ ID NO: 15341 - DNA, 21 bp, synthetic construct
  misc_feature 1..21: note = Synthetic
  source 1..21: mol_type = other DNA
ttagtagagacggggtttcac

SEQ ID NO: 15342 - DNA, 21 bp, synthetic construct
  misc_feature 1..21: note = Synthetic
  source 1..21: mol_type = other DNA
ttatagttgtatttctgaaat

SEQ ID NO: 15343 - DNA, 21 bp, synthetic construct
  misc_feature 1..21: note = Synthetic
  source 1..21: mol_type = other DNA
ttatatatatgtgtgtatata

SEQ ID NO: 15344 - DNA, 21 bp, synthetic construct
  misc_feature 1..21: note = Synthetic
  source 1..21: mol_type = other DNA
ttatcacggttccctgcactg

SEQ ID NO: 15345 - DNA, 21 bp, synthetic construct
  misc_feature 1..21: note = Synthetic
  source 1..21: mol_type = other DNA
ttatccttcacgaggaaagga

SEQ ID NO: 15346 - DNA, 21 bp, synthetic construct
  misc_feature 1..21: note = Synthetic
  source 1..21: mol_type = other DNA
ttatttatttttttatagttg

SEQ ID NO: 15347 - DNA, 21 bp, synthetic construct
  misc_feature 1..21: note = Synthetic
  source 1..21: mol_type = other DNA
ttatttttttatagttgtatt

SEQ ID NO: 15348 - DNA, 21 bp, synthetic construct
  misc_feature 1..21: note = Synthetic
  source 1..21: mol_type = other DNA
ttcaaccaatatacaaagtgc

SEQ ID NO: 15349 - DNA, 21 bp, synthetic construct
  misc_feature 1..21: note = Synthetic
  source 1..21: mol_type = other DNA
ttcaacctcgtaaggaaccga

SEQ ID NO: 15350 - DNA, 21 bp, synthetic construct
  misc_feature 1..21: note = Synthetic
  source 1..21: mol_type = other DNA
ttcacaccattctcctgcctc

SEQ ID NO: 15351 - DNA, 21 bp, synthetic construct
  misc_feature 1..21: note = Synthetic
  source 1..21: mol_type = other DNA
ttcacgaggaaaggaagaaac

SEQ ID NO: 15352 - DNA, 21 bp, synthetic construct
  misc_feature 1..21: note = Synthetic
  source 1..21: mol_type = other DNA
ttcacgatcacggctttgaag

SEQ ID NO: 15353 - DNA, 21 bp, synthetic construct
  misc_feature 1..21: note = Synthetic
  source 1..21: mol_type = other DNA
ttcacgcagagctggctgcag

SEQ ID NO: 15354 - DNA, 21 bp, synthetic construct
  misc_feature 1..21: note = Synthetic
  source 1..21: mol_type = other DNA
ttcacgccacgtcatcctcca

SEQ ID NO: 15355 - DNA, 21 bp, synthetic construct
  misc_feature 1..21: note = Synthetic
  source 1..21: mol_type = other DNA
ttcacgcccttggtatccgca

SEQ ID NO: 15356 - DNA, 21 bp, synthetic construct
  misc_feature 1..21: note = Synthetic
  source 1..21: mol_type = other DNA
ttcacgcgggagtctgacgga

SEQ ID NO: 15357 - DNA, 21 bp, synthetic construct
  misc_feature 1..21: note = Synthetic
  source 1..21: mol_type = other DNA
ttcacgtgttagccaggatgg

SEQ ID NO: 15358 - DNA, 21 bp, synthetic construct
  misc_feature 1..21: note = Synthetic
  source 1..21: mol_type = other DNA
ttcactcctcttggctgggtg

SEQ ID NO: 15359 - DNA, 21 bp, synthetic construct
  misc_feature 1..21: note = Synthetic
  source 1..21: mol_type = other DNA
ttcagaaagaacctgaagtcc

SEQ ID NO: 15360 - DNA, 21 bp, synthetic construct
  misc_feature 1..21: note = Synthetic
  source 1..21: mol_type = other DNA
ttcagaggcaataacccccta

SEQ ID NO: 15361 - DNA, 21 bp, synthetic construct
  misc_feature 1..21: note = Synthetic
  source 1..21: mol_type = other DNA
ttcagccaacaagttgacatc

SEQ ID NO: 15362 - DNA, 21 bp, synthetic construct
  misc_feature 1..21: note = Synthetic
  source 1..21: mol_type = other DNA
ttcagccagatcatttccgac

SEQ ID NO: 15363 - DNA, 21 bp, synthetic construct
  misc_feature 1..21: note = Synthetic
  source 1..21: mol_type = other DNA
ttcaggccccctttcttgatc

SEQ ID NO: 15364 - DNA, 21 bp, synthetic construct
  misc_feature 1..21: note = Synthetic
  source 1..21: mol_type = other DNA
ttcaggctacaaaaaccttct

SEQ ID NO: 15365 - DNA, 21 bp, synthetic construct
  misc_feature 1..21: note = Synthetic
  source 1..21: mol_type = other DNA
ttcagtcaccagcgagtagat

SEQ ID NO: 15366 - DNA, 21 bp, synthetic construct
  misc_feature 1..21: note = Synthetic
  source 1..21: mol_type = other DNA
ttcatcctccaagatggtctt

SEQ ID NO: 15367 - DNA, 21 bp, synthetic construct
  misc_feature 1..21: note = Synthetic
  source 1..21: mol_type = other DNA
ttcatcgctcatgtccttgca

SEQ ID NO: 15368 - DNA, 21 bp, synthetic construct
  misc_feature 1..21: note = Synthetic
  source 1..21: mol_type = other DNA
ttcatctgaccagtcccggca

SEQ ID NO: 15369 - DNA, 21 bp, synthetic construct
  misc_feature 1..21: note = Synthetic
  source 1..21: mol_type = other DNA
ttcatctgttgcccaggctgg

SEQ ID NO: 15370 - DNA, 21 bp, synthetic construct
  misc_feature 1..21: note = Synthetic
  source 1..21: mol_type = other DNA
ttcatcttccatgtttgagga

SEQ ID NO: 15371 - DNA, 21 bp, synthetic construct
  misc_feature 1..21: note = Synthetic
  source 1..21: mol_type = other DNA
ttcattgacacgggctttccc

SEQ ID NO: 15372 - DNA, 21 bp, synthetic construct
  misc_feature 1..21: note = Synthetic
  source 1..21: mol_type = other DNA
ttcatttaagaaatttaattg

SEQ ID NO: 15373 - DNA, 21 bp, synthetic construct
  misc_feature 1..21: note = Synthetic
  source 1..21: mol_type = other DNA
ttcattttttaagagatgggg

SEQ ID NO: 15374 - DNA, 21 bp, synthetic construct
  misc_feature 1..21: note = Synthetic
  source 1..21: mol_type = other DNA
ttccagccccagggccccatg

SEQ ID NO: 15375 - DNA, 21 bp, synthetic construct
  misc_feature 1..21: note = Synthetic
  source 1..21: mol_type = other DNA
ttccatagaaggaagaccccc

SEQ ID NO: 15376 - DNA, 21 bp, synthetic construct
  misc_feature 1..21: note = Synthetic
  source 1..21: mol_type = other DNA
ttccatcagagcactggaatt

SEQ ID NO: 15377 - DNA, 21 bp, synthetic construct
  misc_feature 1..21: note = Synthetic
  source 1..21: mol_type = other DNA
ttccatgtttgaggattgtgt

SEQ ID NO: 15378 - DNA, 21 bp, synthetic construct
  misc_feature 1..21: note = Synthetic
  source 1..21: mol_type = other DNA
ttcccatcgtggcagcgaaac

SEQ ID NO: 15379 - DNA, 21 bp, synthetic construct
  misc_feature 1..21: note = Synthetic
  source 1..21: mol_type = other DNA
ttccccagtcagtccagtaca

SEQ ID NO: 15380 - DNA, 21 bp, synthetic construct
  misc_feature 1..21: note = Synthetic
  source 1..21: mol_type = other DNA
ttcccgggttcacaccattct

SEQ ID NO: 15381 - DNA, 21 bp, synthetic construct
  misc_feature 1..21: note = Synthetic
  source 1..21: mol_type = other DNA
ttcccggtcacactgccggct

SEQ ID NO: 15382 - DNA, 21 bp, synthetic construct
  misc_feature 1..21: note = Synthetic
  source 1..21: mol_type = other DNA
ttcccgtcttggcactggaac

SEQ ID NO: 15383 - DNA, 21 bp, synthetic construct
  misc_feature 1..21: note = Synthetic
  source 1..21: mol_type = other DNA
ttccctgcactgggggggaca

SEQ ID NO: 15384 - DNA, 21 bp, synthetic construct
  misc_feature 1..21: note = Synthetic
  source 1..21: mol_type = other DNA
ttccctggcctgggatcccat

SEQ ID NO: 15385 - DNA, 21 bp, synthetic construct
  misc_feature 1..21: note = Synthetic
  source 1..21: mol_type = other DNA
ttccgacgccatgaatccctt

SEQ ID NO: 15386 - DNA, 21 bp, synthetic construct
  misc_feature 1..21: note = Synthetic
  source 1..21: mol_type = other DNA
ttccggttgcccccgttgaca

SEQ ID NO: 15387 - DNA, 21 bp, synthetic construct
  misc_feature 1..21: note = Synthetic
  source 1..21: mol_type = other DNA
ttcctcacactggcacttgta

SEQ ID NO: 15388 - DNA, 21 bp, synthetic construct
  misc_feature 1..21: note = Synthetic
  source 1..21: mol_type = other DNA
ttcctcaggttggggatgagg

SEQ ID NO: 15389 - DNA, 21 bp, synthetic construct
  misc_feature 1..21: note = Synthetic
  source 1..21: mol_type = other DNA
ttcctcgtcagatttgtcctt

SEQ ID NO: 15390 - DNA, 21 bp, synthetic construct
  misc_feature 1..21: note = Synthetic
  source 1..21: mol_type = other DNA
ttcctctgccagcaacgtcgc

SEQ ID NO: 15391 - DNA, 21 bp, synthetic construct
  misc_feature 1..21: note = Synthetic
  source 1..21: mol_type = other DNA
ttcctcttcacgcccttggta

SEQ ID NO: 15392 - DNA, 21 bp, synthetic construct
  misc_feature 1..21: note = Synthetic
  source 1..21: mol_type = other DNA
ttcctgacctcgtgccggttg

SEQ ID NO: 15393 - DNA, 21 bp, synthetic construct
  misc_feature 1..21: note = Synthetic
  source 1..21: mol_type = other DNA
ttcctggagagaaatggaggt

SEQ ID NO: 15394 - DNA, 21 bp, synthetic construct
  misc_feature 1..21: note = Synthetic
  source 1..21: mol_type = other DNA
ttcctggcttaaggaaggtac

SEQ ID NO: 15395 - DNA, 21 bp, synthetic construct
  misc_feature 1..21: note = Synthetic
  source 1..21: mol_type = other DNA
ttcgcagtcggggtcgttgtc

SEQ ID NO: 15396 - DNA, 21 bp, synthetic construct
  misc_feature 1..21: note = Synthetic
  source 1..21: mol_type = other DNA
ttcgcatctgtcgcccacgtg

SEQ ID NO: 15397 - DNA, 21 bp, synthetic construct
  misc_feature 1..21: note = Synthetic
  source 1..21: mol_type = other DNA
ttcgcatctgtcgcccactgc

SEQ ID NO: 15398 - DNA, 21 bp, synthetic construct
  misc_feature 1..21: note = Synthetic
  source 1..21: mol_type = other DNA
ttcgcatcttcgctgggccac

SEQ ID NO: 15399 - DNA, 21 bp, synthetic construct
  misc_feature 1..21: note = Synthetic
  source 1..21: mol_type = other DNA
ttcgccaggagggcccaggat

SEQ ID NO: 15400 - DNA, 21 bp, synthetic construct
  misc_feature 1..21: note = Synthetic
  source 1..21: mol_type = other DNA
ttcgccgctgtgacacttgaa

SEQ ID NO: 15401 - DNA, 21 bp, synthetic construct
  misc_feature 1..21: note = Synthetic
  source 1..21: mol_type = other DNA
ttcgctgggccaccagctgga

SEQ ID NO: 15402 - DNA, 21 bp, synthetic construct
  misc_feature 1..21: note = Synthetic
  source 1..21: mol_type = other DNA
ttcgggggtgacagggcaaag

SEQ ID NO: 15403 - DNA, 21 bp, synthetic construct
  misc_feature 1..21: note = Synthetic
  source 1..21: mol_type = other DNA
ttcgtcagggcgacaggtggc

SEQ ID NO: 15404 - DNA, 21 bp, synthetic construct
  misc_feature 1..21: note = Synthetic
  source 1..21: mol_type = other DNA
ttcgtgcaaataatctttgta

SEQ ID NO: 15405 - DNA, 21 bp, synthetic construct
  misc_feature 1..21: note = Synthetic
  source 1..21: mol_type = other DNA
ttcgtgtgggggtccagctgg

SEQ ID NO: 15406 - DNA, 21 bp, synthetic construct
  misc_feature 1..21: note = Synthetic
  source 1..21: mol_type = other DNA
ttcgttgatgatatctgtcca

SEQ ID NO: 15407 - DNA, 21 bp, synthetic construct
  misc_feature 1..21: note = Synthetic
  source 1..21: mol_type = other DNA
ttcgttggtcccgcactcttt

SEQ ID NO: 15408 - DNA, 21 bp, synthetic construct
  misc_feature 1..21: note = Synthetic
  source 1..21: mol_type = other DNA
ttctatacagtggtttaaaaa

SEQ ID NO: 15409 - DNA, 21 bp, synthetic construct
  misc_feature 1..21: note = Synthetic
  source 1..21: mol_type = other DNA
ttctattgctggccacctccg

SEQ ID NO: 15410 - DNA, 21 bp, synthetic construct
  misc_feature 1..21: note = Synthetic
  source 1..21: mol_type = other DNA
ttctcatttcctctgccagca

SEQ ID NO: 15411 - DNA, 21 bp, synthetic construct
  misc_feature 1..21: note = Synthetic
  source 1..21: mol_type = other DNA
ttctcccaaaaagcgttgcac

SEQ ID NO: 15412 - DNA, 21 bp, synthetic construct
  misc_feature 1..21: note = Synthetic
  source 1..21: mol_type = other DNA
ttctccctgaataacgttttc

SEQ ID NO: 15413 - DNA, 21 bp, synthetic construct
  misc_feature 1..21: note = Synthetic
  source 1..21: mol_type = other DNA
ttctcctgcctcagcctcccg

SEQ ID NO: 15414 - DNA, 21 bp, synthetic construct
  misc_feature 1..21: note = Synthetic
  source 1..21: mol_type = other DNA
ttctcgatattcacgatcacg

SEQ ID NO: 15415 - DNA, 21 bp, synthetic construct
  misc_feature 1..21: note = Synthetic
  source 1..21: mol_type = other DNA
ttctctgggacaggtcagacc

SEQ ID NO: 15416 - DNA, 21 bp, synthetic construct
  misc_feature 1..21: note = Synthetic
  source 1..21: mol_type = other DNA
ttctctgggcctgacatcccc

SEQ ID NO: 15417 - DNA, 21 bp, synthetic construct
  misc_feature 1..21: note = Synthetic
  source 1..21: mol_type = other DNA
ttctctgtctttgaataaaac

SEQ ID NO: 15418 - DNA, 21 bp, synthetic construct
  misc_feature 1..21: note = Synthetic
  source 1..21: mol_type = other DNA
ttctcttatccttcacgagga

SEQ ID NO: 15419 - DNA, 21 bp, synthetic construct
  misc_feature 1..21: note = Synthetic
  source 1..21: mol_type = other DNA
ttctgaaatagggtcttcatc

SEQ ID NO: 15420 - DNA, 21 bp, synthetic construct
  misc_feature 1..21: note = Synthetic
  source 1..21: mol_type = other DNA
ttctgaggcaacgtttcaacc

SEQ ID NO: 15421 - DNA, 21 bp, synthetic construct
  misc_feature 1..21: note = Synthetic
  source 1..21: mol_type = other DNA
ttctgatagacggggttgtca

SEQ ID NO: 15422 - DNA, 21 bp, synthetic construct
  misc_feature 1..21: note = Synthetic
  source 1..21: mol_type = other DNA
ttctgcctcccagatgaataa

SEQ ID NO: 15423 - DNA, 21 bp, synthetic construct
  misc_feature 1..21: note = Synthetic
  source 1..21: mol_type = other DNA
ttctgggcagggacgggactc

SEQ ID NO: 15424 - DNA, 21 bp, synthetic construct
  misc_feature 1..21: note = Synthetic
  source 1..21: mol_type = other DNA
ttcttaagccgccagttcttc

SEQ ID NO: 15425 - DNA, 21 bp, synthetic construct
  misc_feature 1..21: note = Synthetic
  source 1..21: mol_type = other DNA
ttcttccatagaaggaagacc

SEQ ID NO: 15426 - DNA, 21 bp, synthetic construct
  misc_feature 1..21: note = Synthetic
  source 1..21: mol_type = other DNA
ttcttctcatttcctctgcca

SEQ ID NO: 15427 - DNA, 21 bp, synthetic construct
  misc_feature 1..21: note = Synthetic
  source 1..21: mol_type = other DNA
ttcttgatcttggcgggagtt

SEQ ID NO: 15428 - DNA, 21 bp, synthetic construct
  misc_feature 1..21: note = Synthetic
  source 1..21: mol_type = other DNA
ttctttcgcatctgtcgccca

SEQ ID NO: 15429 - DNA, 21 bp, synthetic construct
  misc_feature 1..21: note = Synthetic
  source 1..21: mol_type = other DNA
ttgaaagccacttgcttctct

SEQ ID NO: 15430 - DNA, 21 bp, synthetic construct
  misc_feature 1..21: note = Synthetic
  source 1..21: mol_type = other DNA
ttgaacttgttgggtccctcg

SEQ ID NO: 15431 - DNA, 21 bp, synthetic construct
  misc_feature 1..21: note = Synthetic
  source 1..21: mol_type = other DNA
ttgaagtcccggtcaacctgc

SEQ ID NO: 15432 - DNA, 21 bp, synthetic construct
  misc_feature 1..21: note = Synthetic
  source 1..21: mol_type = other DNA
ttgaataaaacaaggccggcg

SEQ ID NO: 15433 - DNA, 21 bp, synthetic construct
  misc_feature 1..21: note = Synthetic
  source 1..21: mol_type = other DNA
ttgacacggcccccacagctg

SEQ ID NO: 15434 - DNA, 21 bp, synthetic construct
  misc_feature 1..21: note = Synthetic
  source 1..21: mol_type = other DNA
ttgacacgggctttccctggc

SEQ ID NO: 15435 - DNA, 21 bp, synthetic construct
  misc_feature 1..21: note = Synthetic
  source 1..21: mol_type = other DNA
ttgacatcgatgcttgagatg

SEQ ID NO: 15436 - DNA, 21 bp, synthetic construct
  misc_feature 1..21: note = Synthetic
  source 1..21: mol_type = other DNA
ttgacatcggaacctgtgagg

SEQ ID NO: 15437 - DNA, 21 bp, synthetic construct
  misc_feature 1..21: note = Synthetic
  source 1..21: mol_type = other DNA
ttgactcctgagtttaggggt

SEQ ID NO: 15438 - DNA, 21 bp, synthetic construct
  misc_feature 1..21: note = Synthetic
  source 1..21: mol_type = other DNA
ttgagacggagtctcgctctg

SEQ ID NO: 15439 - DNA, 21 bp, synthetic construct
  misc_feature 1..21: note = Synthetic
  source 1..21: mol_type = other DNA
ttgagatggagtgaagtttgg

SEQ ID NO: 15440 - DNA, 21 bp, synthetic construct
  misc_feature 1..21: note = Synthetic
  source 1..21: mol_type = other DNA
ttgaggattgtgtcacggtgg

SEQ ID NO: 15441 - DNA, 21 bp, synthetic construct
  misc_feature 1..21: note = Synthetic
  source 1..21: mol_type = other DNA
ttgagggtggccgggggcccc

SEQ ID NO: 15442 - DNA, 21 bp, synthetic construct
  misc_feature 1..21: note = Synthetic
  source 1..21: mol_type = other DNA
ttgatcacagtaagacattca

SEQ ID NO: 15443 - DNA, 21 bp, synthetic construct
  misc_feature 1..21: note = Synthetic
  source 1..21: mol_type = other DNA
ttgatcggggctggtggggcg

SEQ ID NO: 15444 - DNA, 21 bp, synthetic construct
  misc_feature 1..21: note = Synthetic
  source 1..21: mol_type = other DNA
ttgatctgcggggcagggagg

SEQ ID NO: 15445 - DNA, 21 bp, synthetic construct
  misc_feature 1..21: note = Synthetic
  source 1..21: mol_type = other DNA
ttgatcttggcgggagttccc

SEQ ID NO: 15446 - DNA, 21 bp, synthetic construct
  misc_feature 1..21: note = Synthetic
  source 1..21: mol_type = other DNA
ttgatgatatctgtccaaaat

SEQ ID NO: 15447 - DNA, 21 bp, synthetic construct
  misc_feature 1..21: note = Synthetic
  source 1..21: mol_type = other DNA
ttgatgctgttgatgttctta

SEQ ID NO: 15448 - DNA, 21 bp, synthetic construct
  misc_feature 1..21: note = Synthetic
  source 1..21: mol_type = other DNA
ttgatgggttcatctgaccag

SEQ ID NO: 15449 - DNA, 21 bp, synthetic construct
  misc_feature 1..21: note = Synthetic
  source 1..21: mol_type = other DNA
ttgatgttcttaagccgccag

SEQ ID NO: 15450 - DNA, 21 bp, synthetic construct
  misc_feature 1..21: note = Synthetic
  source 1..21: mol_type = other DNA
ttgcaaaaataaatagatttt

SEQ ID NO: 15451 - DNA, 21 bp, synthetic construct
  misc_feature 1..21: note = Synthetic
  source 1..21: mol_type = other DNA
ttgcacacagtccagttcgtg

SEQ ID NO: 15452 - DNA, 21 bp, synthetic construct
  misc_feature 1..21: note = Synthetic
  source 1..21: mol_type = other DNA
ttgcactggaagctggcggga

SEQ ID NO: 15453 - DNA, 21 bp, synthetic construct
  misc_feature 1..21: note = Synthetic
  source 1..21: mol_type = other DNA
ttgcagacgtgggaacagccg

SEQ ID NO: 15454 - DNA, 21 bp, synthetic construct
  misc_feature 1..21: note = Synthetic
  source 1..21: mol_type = other DNA
ttgcagactttgtccagggtg

SEQ ID NO: 15455 - DNA, 21 bp, synthetic construct
  misc_feature 1..21: note = Synthetic
  source 1..21: mol_type = other DNA
ttgcaggccttcgtgtggggg

SEQ ID NO: 15456 - DNA, 21 bp, synthetic construct
  misc_feature 1..21: note = Synthetic
  source 1..21: mol_type = other DNA
ttgcaggtgacagacaagcac

SEQ ID NO: 15457 - DNA, 21 bp, synthetic construct
  misc_feature 1..21: note = Synthetic
  source 1..21: mol_type = other DNA
ttgcagtcatattcccggtca

SEQ ID NO: 15458 - DNA, 21 bp, synthetic construct
  misc_feature 1..21: note = Synthetic
  source 1..21: mol_type = other DNA
ttgcagtcggggccaccatca

SEQ ID NO: 15459 - DNA, 21 bp, synthetic construct
  misc_feature 1..21: note = Synthetic
  source 1..21: mol_type = other DNA
ttgcatagaagaggtaaacac

SEQ ID NO: 15460 - DNA, 21 bp, synthetic construct
  misc_feature 1..21: note = Synthetic
  source 1..21: mol_type = other DNA
ttgcatagaagtggaagcact

SEQ ID NO: 15461 - DNA, 21 bp, synthetic construct
  misc_feature 1..21: note = Synthetic
  source 1..21: mol_type = other DNA
ttgcatgggcactgtccgaag

SEQ ID NO: 15462 - DNA, 21 bp, synthetic construct
  misc_feature 1..21: note = Synthetic
  source 1..21: mol_type = other DNA
ttgccaatcccttgtgacatc

SEQ ID NO: 15463 - DNA, 21 bp, synthetic construct
  misc_feature 1..21: note = Synthetic
  source 1..21: mol_type = other DNA
ttgcccaggctggaaagcagt

SEQ ID NO: 15464 - DNA, 21 bp, synthetic construct
  misc_feature 1..21: note = Synthetic
  source 1..21: mol_type = other DNA
ttgcccaggctggagtgcagt

SEQ ID NO: 15465 - DNA, 21 bp, synthetic construct
  misc_feature 1..21: note = Synthetic
  source 1..21: mol_type = other DNA
ttgcccccgttgacatcgatg

SEQ ID NO: 15466 - DNA, 21 bp, synthetic construct
  misc_feature 1..21: note = Synthetic
  source 1..21: mol_type = other DNA
ttgctcaggcctggtctccaa

SEQ ID NO: 15467 - DNA, 21 bp, synthetic construct
  misc_feature 1..21: note = Synthetic
  source 1..21: mol_type = other DNA
ttgctcagggtggtcctctca

SEQ ID NO: 15468 - DNA, 21 bp, synthetic construct
  misc_feature 1..21: note = Synthetic
  source 1..21: mol_type = other DNA
ttgctcgtctgagccgttgtc

SEQ ID NO: 15469 - DNA, 21 bp, synthetic construct
  misc_feature 1..21: note = Synthetic
  source 1..21: mol_type = other DNA
ttgctggccacctccgtgtcc

SEQ ID NO: 15470 - DNA, 21 bp, synthetic construct
  misc_feature 1..21: note = Synthetic
  source 1..21: mol_type = other DNA
ttgctgtggatccagtccaca

SEQ ID NO: 15471 - DNA, 21 bp, synthetic construct
  misc_feature 1..21: note = Synthetic
  source 1..21: mol_type = other DNA
ttgcttctctgggcctgacat

SEQ ID NO: 15472 - DNA, 21 bp, synthetic construct
  misc_feature 1..21: note = Synthetic
  source 1..21: mol_type = other DNA
ttggaacacgtaaagacccct

SEQ ID NO: 15473 - DNA, 21 bp, synthetic construct
  misc_feature 1..21: note = Synthetic
  source 1..21: mol_type = other DNA
ttggagccgttctccctgaat

SEQ ID NO: 15474 - DNA, 21 bp, synthetic construct
  misc_feature 1..21: note = Synthetic
  source 1..21: mol_type = other DNA
ttggaggcatttgcatagaag

SEQ ID NO: 15475 - DNA, 21 bp, synthetic construct
  misc_feature 1..21: note = Synthetic
  source 1..21: mol_type = other DNA
ttggagtcaacccagtagagg

SEQ ID NO: 15476 - DNA, 21 bp, synthetic construct
  misc_feature 1..21: note = Synthetic
  source 1..21: mol_type = other DNA
ttggcactgaaaatggcttcg

SEQ ID NO: 15477 - DNA, 21 bp, synthetic construct
  misc_feature 1..21: note = Synthetic
  source 1..21: mol_type = other DNA
ttggcactggaactcgtttct

SEQ ID NO: 15478 - DNA, 21 bp, synthetic construct
  misc_feature 1..21: note = Synthetic
  source 1..21: mol_type = other DNA
ttggccatcgcacctccagaa

SEQ ID NO: 15479 - DNA, 21 bp, synthetic construct
  misc_feature 1..21: note = Synthetic
  source 1..21: mol_type = other DNA
ttggcgggagttccccagtca

SEQ ID NO: 15480 - DNA, 21 bp, synthetic construct
  misc_feature 1..21: note = Synthetic
  source 1..21: mol_type = other DNA
ttggctgggtgaggttgtgga

SEQ ID NO: 15481 - DNA, 21 bp, synthetic construct
  misc_feature 1..21: note = Synthetic
  source 1..21: mol_type = other DNA
ttggcttagagattggtggat

SEQ ID NO: 15482 - DNA, 21 bp, synthetic construct
  misc_feature 1..21: note = Synthetic
  source 1..21: mol_type = other DNA
ttggcttggagccgttctccc

SEQ ID NO: 15483 - DNA, 21 bp, synthetic construct
  misc_feature 1..21: note = Synthetic
  source 1..21: mol_type = other DNA
ttgggccactgaatgttttca

SEQ ID NO: 15484 - DNA, 21 bp, synthetic construct
  misc_feature 1..21: note = Synthetic
  source 1..21: mol_type = other DNA
ttgggcgagtgggggttgatc

SEQ ID NO: 15485 - DNA, 21 bp, synthetic construct
  misc_feature 1..21: note = Synthetic
  source 1..21: mol_type = other DNA
ttggggaagtgaatggcttgg

SEQ ID NO: 15486 - DNA, 21 bp, synthetic construct
  misc_feature 1..21: note = Synthetic
  source 1..21: mol_type = other DNA
ttggggatgaggctggtgtac

SEQ ID NO: 15487 - DNA, 21 bp, synthetic construct
  misc_feature 1..21: note = Synthetic
  source 1..21: mol_type = other DNA
ttgggggagcacgtctcctgg

SEQ ID NO: 15488 - DNA, 21 bp, synthetic construct
  misc_feature 1..21: note = Synthetic
  source 1..21: mol_type = other DNA
ttggggggacagccttgctcg

SEQ ID NO: 15489 - DNA, 21 bp, synthetic construct
  misc_feature 1..21: note = Synthetic
  source 1..21: mol_type = other DNA
ttgggtccctcgcagagtgtc

SEQ ID NO: 15490 - DNA, 21 bp, synthetic construct
  misc_feature 1..21: note = Synthetic
  source 1..21: mol_type = other DNA
ttggtatccgcaacagagaca

SEQ ID NO: 15491 - DNA, 21 bp, synthetic construct
  misc_feature 1..21: note = Synthetic
  source 1..21: mol_type = other DNA
ttggtcccgcactctttgatg

SEQ ID NO: 15492 - DNA, 21 bp, synthetic construct
  misc_feature 1..21: note = Synthetic
  source 1..21: mol_type = other DNA
ttggtctcggtgccaccacgg

SEQ ID NO: 15493 - DNA, 21 bp, synthetic construct
  misc_feature 1..21: note = Synthetic
  source 1..21: mol_type = other DNA
ttggtcttctctgtctttgaa

SEQ ID NO: 15494 - DNA, 21 bp, synthetic construct
  misc_feature 1..21: note = Synthetic
  source 1..21: mol_type = other DNA
ttggtgaagaagaggtaggcg

SEQ ID NO: 15495 - DNA, 21 bp, synthetic construct
  misc_feature 1..21: note = Synthetic
  source 1..21: mol_type = other DNA
ttggtgaatgagtttggtctc

SEQ ID NO: 15496 - DNA, 21 bp, synthetic construct
  misc_feature 1..21: note = Synthetic
  source 1..21: mol_type = other DNA
ttggtgagacattgtcactat

SEQ ID NO: 15497 - DNA, 21 bp, synthetic construct
  misc_feature 1..21: note = Synthetic
  source 1..21: mol_type = other DNA
ttggtgccatctgctgttgtg

SEQ ID NO: 15498 - DNA, 21 bp, synthetic construct
  misc_feature 1..21: note = Synthetic
  source 1..21: mol_type = other DNA
ttggtggatgaggcagggcca

SEQ ID NO: 15499 - DNA, 21 bp, synthetic construct
  misc_feature 1..21: note = Synthetic
  source 1..21: mol_type = other DNA
ttggtttttgtagagatggga

SEQ ID NO: 15500 - DNA, 21 bp, synthetic construct
  misc_feature 1..21: note = Synthetic
  source 1..21: mol_type = other DNA
ttgtacataaagaagaggcat

SEQ ID NO: 15501 - DNA, 21 bp, synthetic construct
  misc_feature 1..21: note = Synthetic
  source 1..21: mol_type = other DNA
ttgtagagatgggatctcgct

SEQ ID NO: 15502 - DNA, 21 bp, synthetic construct
  misc_feature 1..21: note = Synthetic
  source 1..21: mol_type = other DNA
ttgtagccaccctccaggttc

SEQ ID NO: 15503 - DNA, 21 bp, synthetic construct
  misc_feature 1..21: note = Synthetic
  source 1..21: mol_type = other DNA
ttgtaggagatgcatttcccg

SEQ ID NO: 15504 - DNA, 21 bp, synthetic construct
  misc_feature 1..21: note = Synthetic
  source 1..21: mol_type = other DNA
ttgtatttctgaaatagggtc

SEQ ID NO: 15505 - DNA, 21 bp, synthetic construct
  misc_feature 1..21: note = Synthetic
  source 1..21: mol_type = other DNA
ttgtatttttagtagagacgg

SEQ ID NO: 15506 - DNA, 21 bp, synthetic construct
  misc_feature 1..21: note = Synthetic
  source 1..21: mol_type = other DNA
ttgtcaaagttgatgctgttg

SEQ ID NO: 15507 - DNA, 21 bp, synthetic construct
  misc_feature 1..21: note = Synthetic
  source 1..21: mol_type = other DNA
ttgtcactatctccaccgtgg

SEQ ID NO: 15508 - DNA, 21 bp, synthetic construct
  misc_feature 1..21: note = Synthetic
  source 1..21: mol_type = other DNA
ttgtccaagcattcgttggtc

SEQ ID NO: 15509 - DNA, 21 bp, synthetic construct
  misc_feature 1..21: note = Synthetic
  source 1..21: mol_type = other DNA
ttgtccagggtgatgcattcg

SEQ ID NO: 15510 - DNA, 21 bp, synthetic construct
  misc_feature 1..21: note = Synthetic
  source 1..21: mol_type = other DNA
ttgtccctggggacaattgcc

SEQ ID NO: 15511 - DNA, 21 bp, synthetic construct
  misc_feature 1..21: note = Synthetic
  source 1..21: mol_type = other DNA
ttgtcctcaaagacggccaag

SEQ ID NO: 15512 - DNA, 21 bp, synthetic construct
  misc_feature 1..21: note = Synthetic
  source 1..21: mol_type = other DNA
ttgtccttgcagtcggggcca

SEQ ID NO: 15513 - DNA, 21 bp, synthetic construct
  misc_feature 1..21: note = Synthetic
  source 1..21: mol_type = other DNA
ttgtcgcaggcccacagctgg

SEQ ID NO: 15514 - DNA, 21 bp, synthetic construct
  misc_feature 1..21: note = Synthetic
  source 1..21: mol_type = other DNA
ttgtcgcagtccacttggcca

SEQ ID NO: 15515 - DNA, 21 bp, synthetic construct
  misc_feature 1..21: note = Synthetic
  source 1..21: mol_type = other DNA
ttgtcgtcgcctttgtgacag

SEQ ID NO: 15516 - DNA, 21 bp, synthetic construct
  misc_feature 1..21: note = Synthetic
  source 1..21: mol_type = other DNA
ttgtgacaggaaccgcggagg

SEQ ID NO: 15517 - DNA, 21 bp, synthetic construct
  misc_feature 1..21: note = Synthetic
  source 1..21: mol_type = other DNA
ttgtgacatcttcacgcggga

SEQ ID NO: 15518 - DNA, 21 bp, synthetic construct
  misc_feature 1..21: note = Synthetic
  source 1..21: mol_type = other DNA
ttgtggaagagaaccatatcc

SEQ ID NO: 15519 - DNA, 21 bp, synthetic construct
  misc_feature 1..21: note = Synthetic
  source 1..21: mol_type = other DNA
ttgtggcaaatgtggacctca

SEQ ID NO: 15520 - DNA, 21 bp, synthetic construct
  misc_feature 1..21: note = Synthetic
  source 1..21: mol_type = other DNA
ttgtgtcacggtggagagaaa

SEQ ID NO: 15521 - DNA, 21 bp, synthetic construct
  misc_feature 1..21: note = Synthetic
  source 1..21: mol_type = other DNA
ttgtgtgctgtgtccttacgg

SEQ ID NO: 15522 - DNA, 21 bp, synthetic construct
  misc_feature 1..21: note = Synthetic
  source 1..21: mol_type = other DNA
ttgtgtgttgaaagccacttg

SEQ ID NO: 15523 - DNA, 21 bp, synthetic construct
  misc_feature 1..21: note = Synthetic
  source 1..21: mol_type = other DNA
ttgttgctcaggcctggtctc

SEQ ID NO: 15524 - DNA, 21 bp, synthetic construct
  misc_feature 1..21: note = Synthetic
  source 1..21: mol_type = other DNA
ttgttgggtccctcgcagagt

SEQ ID NO: 15525 - DNA, 21 bp, synthetic construct
  misc_feature 1..21: note = Synthetic
  source 1..21: mol_type = other DNA
ttgttgtccaagcattcgttg

SEQ ID NO: 15526 - DNA, 21 bp, synthetic construct
  misc_feature 1..21: note = Synthetic
  source 1..21: mol_type = other DNA
ttgttttttttttttgagacg

SEQ ID NO: 15527 - DNA, 21 bp, synthetic construct
  misc_feature 1..21: note = Synthetic
  source 1..21: mol_type = other DNA
tttaaaaagtgacacccatct

SEQ ID NO: 15528 - DNA, 21 bp, synthetic construct
  misc_feature 1..21: note = Synthetic
  source 1..21: mol_type = other DNA
tttaaacacatacccatcaac

SEQ ID NO: 15529 - DNA, 21 bp, synthetic construct
  misc_feature 1..21: note = Synthetic
  source 1..21: mol_type = other DNA
tttaactttttggtttttgta

SEQ ID NO: 15530 - DNA, 21 bp, synthetic construct
  misc_feature 1..21: note = Synthetic
  source 1..21: mol_type = other DNA
tttaagaaatttaattgatca

SEQ ID NO: 15531 - DNA, 21 bp, synthetic construct
  misc_feature 1..21: note = Synthetic
  source 1..21: mol_type = other DNA
tttaagagatggggtcttact

SEQ ID NO: 15532 - DNA, 21 bp, synthetic construct
  misc_feature 1..21: note = Synthetic
  source 1..21: mol_type = other DNA
tttaattgatcacagtaagac

SEQ ID NO: 15533 - DNA, 21 bp, synthetic construct
  misc_feature 1..21: note = Synthetic
  source 1..21: mol_type = other DNA
tttacgtgctccgaaaccaga

SEQ ID NO: 15534 - DNA, 21 bp, synthetic construct
  misc_feature 1..21: note = Synthetic
  source 1..21: mol_type = other DNA
tttagcctgacggtggatgtc

SEQ ID NO: 15535 - DNA, 21 bp, synthetic construct
  misc_feature 1..21: note = Synthetic
  source 1..21: mol_type = other DNA
tttaggggtttggcttagaga

SEQ ID NO: 15536 - DNA, 21 bp, synthetic construct
  misc_feature 1..21: note = Synthetic
  source 1..21: mol_type = other DNA
tttagtagagacggggtttca

SEQ ID NO: 15537 - DNA, 21 bp, synthetic construct
  misc_feature 1..21: note = Synthetic
  source 1..21: mol_type = other DNA
tttatagttgtatttctgaaa

SEQ ID NO: 15538 - DNA, 21 bp, synthetic construct
  misc_feature 1..21: note = Synthetic
  source 1..21: mol_type = other DNA
tttatatatatgtgtgtatat

SEQ ID NO: 15539 - DNA, 21 bp, synthetic construct
  misc_feature 1..21: note = Synthetic
  source 1..21: mol_type = other DNA
tttatttatttttttatagtt

SEQ ID NO: 15540 - DNA, 21 bp, synthetic construct
  misc_feature 1..21: note = Synthetic
  source 1..21: mol_type = other DNA
tttatttttttatagttgtat

SEQ ID NO: 15541 - DNA, 21 bp, synthetic construct
  misc_feature 1..21: note = Synthetic
  source 1..21: mol_type = other DNA
tttcaaccaatatacaaagtg

SEQ ID NO: 15542 - DNA, 21 bp, synthetic construct
  misc_feature 1..21: note = Synthetic
  source 1..21: mol_type = other DNA
tttcaacctcgtaaggaaccg

SEQ ID NO: 15543 - DNA, 21 bp, synthetic construct
  misc_feature 1..21: note = Synthetic
  source 1..21: mol_type = other DNA
tttcacgtgttagccaggatg

SEQ ID NO: 15544 - DNA, 21 bp, synthetic construct
  misc_feature 1..21: note = Synthetic
  source 1..21: mol_type = other DNA
tttcagaaagaacctgaagtc

SEQ ID NO: 15545 - DNA, 21 bp, synthetic construct
  misc_feature 1..21: note = Synthetic
  source 1..21: mol_type = other DNA
tttcagaggcaataaccccct

SEQ ID NO: 15546 - DNA, 21 bp, synthetic construct
  misc_feature 1..21: note = Synthetic
  source 1..21: mol_type = other DNA
tttcagccaacaagttgacat

SEQ ID NO: 15547 - DNA, 21 bp, synthetic construct
  misc_feature 1..21: note = Synthetic
  source 1..21: mol_type = other DNA
tttcagtcaccagcgagtaga

SEQ ID NO: 15548 - DNA, 21 bp, synthetic construct
  misc_feature 1..21: note = Synthetic
  source 1..21: mol_type = other DNA
tttcatcctccaagatggtct

SEQ ID NO: 15549 - DNA, 21 bp, synthetic construct
  misc_feature 1..21: note = Synthetic
  source 1..21: mol_type = other DNA
tttcatcttccatgtttgagg

SEQ ID NO: 15550 - DNA, 21 bp, synthetic construct
  misc_feature 1..21: note = Synthetic
  source 1..21: mol_type = other DNA
tttccagccccagggccccat

SEQ ID NO: 15551 - DNA, 21 bp, synthetic construct
  misc_feature 1..21: note = Synthetic
  source 1..21: mol_type = other DNA
tttccatcagagcactggaat

SEQ ID NO: 15552 - DNA, 21 bp, synthetic construct
  misc_feature 1..21: note = Synthetic
  source 1..21: mol_type = other DNA
tttcccgtcttggcactggaa

SEQ ID NO: 15553 - DNA, 21 bp, synthetic construct
  misc_feature 1..21: note = Synthetic
  source 1..21: mol_type = other DNA
tttccctggcctgggatccca

SEQ ID NO: 15554 - DNA, 21 bp, synthetic construct
  misc_feature 1..21: note = Synthetic
  source 1..21: mol_type = other DNA
tttccgacgccatgaatccct

SEQ ID NO: 15555 - DNA, 21 bp, synthetic construct
  misc_feature 1..21: note = Synthetic
  source 1..21: mol_type = other DNA
tttcctcgtcagatttgtcct

SEQ ID NO: 15556 - DNA, 21 bp, synthetic construct
  misc_feature 1..21: note = Synthetic
  source 1..21: mol_type = other DNA
tttcctctgccagcaacgtcg

SEQ ID NO: 15557 - DNA, 21 bp, synthetic construct
  misc_feature 1..21: note = Synthetic
  source 1..21: mol_type = other DNA
tttcctcttcacgcccttggt

SEQ ID NO: 15558 - DNA, 21 bp, synthetic construct
  misc_feature 1..21: note = Synthetic
  source 1..21: mol_type = other DNA
tttcctggcttaaggaaggta

SEQ ID NO: 15559 - DNA, 21 bp, synthetic construct
  misc_feature 1..21: note = Synthetic
  source 1..21: mol_type = other DNA
tttcgcatctgtcgcccacgt

SEQ ID NO: 15560 - DNA, 21 bp, synthetic construct
  misc_feature 1..21: note = Synthetic
  source 1..21: mol_type = other DNA
tttcgcatctgtcgcccactg

SEQ ID NO: 15561 - DNA, 21 bp, synthetic construct
  misc_feature 1..21: note = Synthetic
  source 1..21: mol_type = other DNA
tttctcttatccttcacgagg

SEQ ID NO: 15562 - DNA, 21 bp, synthetic construct
  misc_feature 1..21: note = Synthetic
  source 1..21: mol_type = other DNA
tttctgaaatagggtcttcat

SEQ ID NO: 15563 - DNA, 21 bp, synthetic construct
  misc_feature 1..21: note = Synthetic
  source 1..21: mol_type = other DNA
tttcttgatcttggcgggagt

SEQ ID NO: 15564 - DNA, 21 bp, synthetic construct
  misc_feature 1..21: note = Synthetic
  source 1..21: mol_type = other DNA
tttctttcgcatctgtcgccc

SEQ ID NO: 15565 - DNA, 21 bp, synthetic construct
  misc_feature 1..21: note = Synthetic
  source 1..21: mol_type = other DNA
tttgaagtcccggtcaacctg

SEQ ID NO: 15566 - DNA, 21 bp, synthetic construct
  misc_feature 1..21: note = Synthetic
  source 1..21: mol_type = other DNA
tttgaataaaacaaggccggc

SEQ ID NO: 15567 - DNA, 21 bp, synthetic construct
  misc_feature 1..21: note = Synthetic
  source 1..21: mol_type = other DNA
tttgagacggagtctcgctct

SEQ ID NO: 15568 - DNA, 21 bp, synthetic construct
  misc_feature 1..21: note = Synthetic
  source 1..21: mol_type = other DNA
tttgaggattgtgtcacggtg

SEQ ID NO: 15569 - DNA, 21 bp, synthetic construct
  misc_feature 1..21: note = Synthetic
  source 1..21: mol_type = other DNA
tttgatgggttcatctgacca

SEQ ID NO: 15570 - DNA, 21 bp, synthetic construct
  misc_feature 1..21: note = Synthetic
  source 1..21: mol_type = other DNA
tttgcaaaaataaatagattt

SEQ ID NO: 15571 - DNA, 21 bp, synthetic construct
  misc_feature 1..21: note = Synthetic
  source 1..21: mol_type = other DNA
tttgcaggtgacagacaagca

SEQ ID NO: 15572 - DNA, 21 bp, synthetic construct
  misc_feature 1..21: note = Synthetic
  source 1..21: mol_type = other DNA
tttgcatagaagtggaagcac

SEQ ID NO: 15573 - DNA, 21 bp, synthetic construct
  misc_feature 1..21: note = Synthetic
  source 1..21: mol_type = other DNA
tttggagtcaacccagtagag

SEQ ID NO: 15574 - DNA, 21 bp, synthetic construct
  misc_feature 1..21: note = Synthetic
  source 1..21: mol_type = other DNA
tttggcttagagattggtgga

SEQ ID NO: 15575 - DNA, 21 bp, synthetic construct
  misc_feature 1..21: note = Synthetic
  source 1..21: mol_type = other DNA
tttggtctcggtgccaccacg

SEQ ID NO: 15576 - DNA, 21 bp, synthetic construct
  misc_feature 1..21: note = Synthetic
  source 1..21: mol_type = other DNA
tttggtcttctctgtctttga

SEQ ID NO: 15577 - DNA, 21 bp, synthetic construct
  misc_feature 1..21: note = Synthetic
  source 1..21: mol_type = other DNA
tttggtgaatgagtttggtct

SEQ ID NO: 15578 - DNA, 21 bp, synthetic construct
  misc_feature 1..21: note = Synthetic
  source 1..21: mol_type = other DNA
tttggtttttgtagagatggg

SEQ ID NO: 15579 - DNA, 21 bp, synthetic construct
  misc_feature 1..21: note = Synthetic
  source 1..21: mol_type = other DNA
tttgtacataaagaagaggca

SEQ ID NO: 15580 - DNA, 21 bp, synthetic construct
  misc_feature 1..21: note = Synthetic
  source 1..21: mol_type = other DNA
tttgtagagatgggatctcgc

SEQ ID NO: 15581 - DNA, 21 bp, synthetic construct
  misc_feature 1..21: note = Synthetic
  source 1..21: mol_type = other DNA
tttgtatttttagtagagacg

SEQ ID NO: 15582 - DNA, 21 bp, synthetic construct
  misc_feature 1..21: note = Synthetic
  source 1..21: mol_type = other DNA
tttgtccagggtgatgcattc

SEQ ID NO: 15583 - DNA, 21 bp, synthetic construct
  misc_feature 1..21: note = Synthetic
  source 1..21: mol_type = other DNA
tttgtccctggggacaattgc

SEQ ID NO: 15584 - DNA, 21 bp, synthetic construct
  misc_feature 1..21: note = Synthetic
  source 1..21: mol_type = other DNA
tttgtcctcaaagacggccaa

SEQ ID NO: 15585 - DNA, 21 bp, synthetic construct
  misc_feature 1..21: note = Synthetic
  source 1..21: mol_type = other DNA
tttgtccttgcagtcggggcc

SEQ ID NO: 15586 - DNA, 21 bp, synthetic construct
  misc_feature 1..21: note = Synthetic
  source 1..21: mol_type = other DNA
tttgtgacaggaaccgcggag

SEQ ID NO: 15587 - DNA, 21 bp, synthetic construct
  misc_feature 1..21: note = Synthetic
  source 1..21: mol_type = other DNA
tttgttgctcaggcctggtct

SEQ ID NO: 15588 - DNA, 21 bp, synthetic construct
  misc_feature 1..21: note = Synthetic
  source 1..21: mol_type = other DNA
tttgttttttttttttgagac

SEQ ID NO: 15589 - DNA, 21 bp, synthetic construct
  misc_feature 1..21: note = Synthetic
  source 1..21: mol_type = other DNA
ttttaaacacatacccatcaa

SEQ ID NO: 15590 - DNA, 21 bp, synthetic construct
  misc_feature 1..21: note = Synthetic
  source 1..21: mol_type = other DNA
ttttaactttttggtttttgt

SEQ ID NO: 15591 - DNA, 21 bp, synthetic construct
  misc_feature 1..21: note = Synthetic
  source 1..21: mol_type = other DNA
ttttaagagatggggtcttac

SEQ ID NO: 15592 - DNA, 21 bp, synthetic construct
  misc_feature 1..21: note = Synthetic
  source 1..21: mol_type = other DNA
ttttagtagagacggggtttc

SEQ ID NO: 15593 - DNA, 21 bp, synthetic construct
  misc_feature 1..21: note = Synthetic
  source 1..21: mol_type = other DNA
ttttatagttgtatttctgaa

SEQ ID NO: 15594 - DNA, 21 bp, synthetic construct
  misc_feature 1..21: note = Synthetic
  source 1..21: mol_type = other DNA
ttttatatatatgtgtgtata

SEQ ID NO: 15595 - DNA, 21 bp, synthetic construct
  misc_feature 1..21: note = Synthetic
  source 1..21: mol_type = other DNA
ttttcagccaacaagttgaca

SEQ ID NO: 15596 - DNA, 21 bp, synthetic construct
  misc_feature 1..21: note = Synthetic
  source 1..21: mol_type = other DNA
ttttcagtcaccagcgagtag

SEQ ID NO: 15597 - DNA, 21 bp, synthetic construct
  misc_feature 1..21: note = Synthetic
  source 1..21: mol_type = other DNA
ttttcatcctccaagatggtc

SEQ ID NO: 15598 - DNA, 21 bp, synthetic construct
  misc_feature 1..21: note = Synthetic
  source 1..21: mol_type = other DNA
ttttcctcgtcagatttgtcc

SEQ ID NO: 15599 - DNA, 21 bp, synthetic construct
  misc_feature 1..21: note = Synthetic
  source 1..21: mol_type = other DNA
ttttcctcttcacgcccttgg

SEQ ID NO: 15600 - DNA, 21 bp, synthetic construct
  misc_feature 1..21: note = Synthetic
  source 1..21: mol_type = other DNA
ttttgagacggagtctcgctc

SEQ ID NO: 15601 - DNA, 21 bp, synthetic construct
  misc_feature 1..21: note = Synthetic
  source 1..21: mol_type = other DNA
ttttggtttttgtagagatgg

SEQ ID NO: 15602 - DNA, 21 bp, synthetic construct
  misc_feature 1..21: note = Synthetic
  source 1..21: mol_type = other DNA
ttttgtagagatgggatctcg

SEQ ID NO: 15603 - DNA, 21 bp, synthetic construct
  misc_feature 1..21: note = Synthetic
  source 1..21: mol_type = other DNA
ttttgtatttttagtagagac

SEQ ID NO: 15604 - DNA, 21 bp, synthetic construct
  misc_feature 1..21: note = Synthetic
  source 1..21: mol_type = other DNA
ttttgtccctggggacaattg

SEQ ID NO: 15605 - DNA, 21 bp, synthetic construct
  misc_feature 1..21: note = Synthetic
  source 1..21: mol_type = other DNA
ttttgttttttttttttgaga

SEQ ID NO: 15606 - DNA, 21 bp, synthetic construct
  misc_feature 1..21: note = Synthetic
  source 1..21: mol_type = other DNA
tttttaactttttggtttttg

SEQ ID NO: 15607 - DNA, 21 bp, synthetic construct
  misc_feature 1..21: note = Synthetic
  source 1..21: mol_type = other DNA
tttttaagagatggggtctta

SEQ ID NO: 15608 - DNA, 21 bp, synthetic construct
  misc_feature 1..21: note = Synthetic
  source 1..21: mol_type = other DNA
tttttagtagagacggggttt

SEQ ID NO: 15609 - DNA, 21 bp, synthetic construct
  misc_feature 1..21: note = Synthetic
  source 1..21: mol_type = other DNA
tttttatagttgtatttctga

SEQ ID NO: 15610 - DNA, 21 bp, synthetic construct
  misc_feature 1..21: note = Synthetic
  source 1..21: mol_type = other DNA
tttttgagacggagtctcgct

SEQ ID NO: 15611 - DNA, 21 bp, synthetic construct
  misc_feature 1..21: note = Synthetic
  source 1..21: mol_type = other DNA
tttttggtttttgtagagatg

SEQ ID NO: 15612 - DNA, 21 bp, synthetic construct
  misc_feature 1..21: note = Synthetic
  source 1..21: mol_type = other DNA
tttttgtagagatgggatctc

SEQ ID NO: 15613 - DNA, 21 bp, synthetic construct
  misc_feature 1..21: note = Synthetic
  source 1..21: mol_type = other DNA
tttttgtatttttagtagaga

SEQ ID NO: 15614 - DNA, 21 bp, synthetic construct
  misc_feature 1..21: note = Synthetic
  source 1..21: mol_type = other DNA
tttttgttttttttttttgag

SEQ ID NO: 15615 - DNA, 21 bp, synthetic construct
  misc_feature 1..21: note = Synthetic
  source 1..21: mol_type = other DNA
ttttttaagagatggggtctt

SEQ ID NO: 15616 - DNA, 21 bp, synthetic construct
  misc_feature 1..21: note = Synthetic
  source 1..21: mol_type = other DNA
ttttttatagttgtatttctg

SEQ ID NO: 15617 - DNA, 21 bp, synthetic construct
  misc_feature 1..21: note = Synthetic
  source 1..21: mol_type = other DNA
ttttttgagacggagtctcgc

SEQ ID NO: 15618 - DNA, 21 bp, synthetic construct
  misc_feature 1..21: note = Synthetic
  source 1..21: mol_type = other DNA
ttttttgtatttttagtagag

SEQ ID NO: 15619 - DNA, 21 bp, synthetic construct
  misc_feature 1..21: note = Synthetic
  source 1..21: mol_type = other DNA
ttttttgttttttttttttga

SEQ ID NO: 15620 - DNA, 21 bp, synthetic construct
  misc_feature 1..21: note = Synthetic
  source 1..21: mol_type = other DNA
tttttttatagttgtatttct

SEQ ID NO: 15621 - DNA, 21 bp, synthetic construct
  misc_feature 1..21: note = Synthetic
  source 1..21: mol_type = other DNA
tttttttgagacggagtctcg

SEQ ID NO: 15622 - DNA, 21 bp, synthetic construct
  misc_feature 1..21: note = Synthetic
  source 1..21: mol_type = other DNA
tttttttgttttttttttttg

SEQ ID NO: 15623 - DNA, 21 bp, synthetic construct
  misc_feature 1..21: note = Synthetic
  source 1..21: mol_type = other DNA
ttttttttgagacggagtctc

SEQ ID NO: 15624 - DNA, 21 bp, synthetic construct
  misc_feature 1..21: note = Synthetic
  source 1..21: mol_type = other DNA
ttttttttgtttttttttttt

SEQ ID NO: 15625 - DNA, 21 bp, synthetic construct
  misc_feature 1..21: note = Synthetic
  source 1..21: mol_type = other DNA
tttttttttgagacggagtct

SEQ ID NO: 15626 - DNA, 21 bp, synthetic construct
  misc_feature 1..21: note = Synthetic
  source 1..21: mol_type = other DNA
tttttttttgttttttttttt

SEQ ID NO: 15627 - DNA, 21 bp, synthetic construct
  misc_feature 1..21: note = Synthetic
  source 1..21: mol_type = other DNA
ttttttttttgagacggagtc

SEQ ID NO: 15628 - DNA, 21 bp, synthetic construct
  misc_feature 1..21: note = Synthetic
  source 1..21: mol_type = other DNA
tttttttttttgagacggagt

SEQ ID NO: 15629 - DNA, 21 bp, synthetic construct
  misc_feature 1..21: note = Synthetic
  source 1..21: mol_type = other DNA
ttttttttttttgagacggag

What is claimed is:

1. A composition comprising an agent that blocks low-density lipoprotein (LDL) binding to a low-density lipoprotein receptor (LDLR) and a delivery molecule, wherein the delivery molecule is capable of delivering the agent to the liver.

2. The composition of claim 1, further comprising a payload.

3. The composition of claim 2, wherein the payload comprises a therapeutic agent.

4. The composition of claim 2 or 3, wherein the payload comprises a component of a CRISPR/Cas system or a nucleic acid encoding one or more component of a CRISPR/Cas system, a biologic, or a small molecule, optionally wherein the component of a CRISPR/Cas system comprises a nucleic acid encoding one or more guide RNAs, one or more scaffolds, and/or one or more endonucleases.

5. The composition of any one of claims 2-4, further comprising a lipid nanoparticle (LNP) or lipoplex, wherein the LNP or lipoplex encapsulates the payload.

6. The composition of any one of claims 1-5, wherein the delivery molecule comprises a lipid nanoparticle (LNP) or lipoplex.

7. The composition of claim 6, wherein the delivery molecule comprises an LNP comprising LP-01, cholesterol, DSPC, and/or DMG-PEG2000.

8. The composition of claim 7, wherein the LNP comprises about 50% LP-01, about 39% cholesterol, about 9% DSPC, and about 2% DMG-PEG2000.

9. The composition of any one of claims 1-8, wherein the delivery molecule comprises one or more of the following: lactose, galactose, N-acetylgalactosamine (GalNAc), GalNAc-6, galactosamine, N-formylgalactosamine, N-acetylgalactosamine, N-propionylgalactosamine, N-butanoylgalactosamine, N-isobutanoyl-galactosamine, and cholesterol, or a derivative thereof.

10. The composition of claim 9, wherein the delivery molecule comprises N-acetylgalactosamine (GalNAc).

11. The composition of claim 10, wherein the delivery molecule comprises GalNAc-6.

12. The composition of any one of claims 1-11, wherein the agent comprises an RNAi.

13. The composition of claim 12, wherein the RNAi is a small-interfering RNA (siRNA), an antisense oligonucleotide (ASO), microRNA (miRNA), double-stranded RNA (dsRNA), short hairpin RNA (shRNA) or an expression cassette encoding an RNA.

14. The composition of claim 12, wherein the agent comprises an siRNA.

15. The composition of claim 14, wherein the siRNA binds to a nucleic acid comprising the nucleotide sequence of any one of SEQ ID NOs: 350-352, or the reverse complement thereof.

16. The composition of claim 14, wherein the siRNA comprises at least 13, at least 14, at least 15, at least 16, at least 17, at least 18, at least 19, at least 20, or at least 21 consecutive nucleic acids of any one of the nucleic acid sequences in Table 3B.

17. The composition of claim 14, wherein the siRNA is at least 80%, at least 85%, at least 90%, or at least 95% identical to any one of the nucleic acid sequences in Table 3B.

18. The composition of claim 12, wherein the agent comprises an antisense oligonucleotide (ASO).

19. The composition of any one of claims 1-18, wherein the LDLR comprises an amino acid sequence that is at least 85%, 90%, 91%, 92%, 93%, 94%, 95%, 96%, 97%, 98%, 99% or 100% identical to any one of the sequences of SEQ ID NOs: 353-355.

20. The composition of claim 4, wherein the component of the CRISPR/Cas system comprises a nucleic acid encoding one or more guide RNAs and a Cas9, wherein the nucleic acid molecule comprises:
a. a first nucleic acid encoding one or more guide RNAs selected from any one of SEQ ID NOs: 1-35, 1000-1078, or 3000-3069 and a second nucleic acid encoding a Staphylococcus aureus Cas9 (SaCas9); or
b. a first nucleic acid encoding one or more guide RNAs selected from any one of SEQ ID NOs: 100-225, 2000-2116, or 4000-4251 and a second nucleic acid encoding a Staphylococcus lugdunensis (SluCas9); or
c. a first nucleic acid encoding one or more guide RNAs comprising at least 20 contiguous nucleotides of a guide RNA selected from any one of SEQ ID NOs: 1-35, 1000-1078, or 3000-3069 and a second nucleic acid encoding a Staphylococcus aureus Cas9 (SaCas9); or
d. a first nucleic acid encoding one or more guide RNAs comprising at least 20 contiguous nucleotides of a guide RNA selected from any one of SEQ ID NOs: 100-225, 2000-2116, or 4000-4251 and a second nucleic acid encoding a Staphylococcus lugdunensis (SluCas9); or
e. a first nucleic acid encoding one or more guide RNAs that is at least 90% identical to any one of SEQ ID NOs: 1-35, 1000-1078, or 3000-3069 and a second nucleic acid encoding a Staphylococcus aureus Cas9 (SaCas9); or
f. a first nucleic acid encoding one or more guide RNAs that is at least 90% identical to any one of SEQ ID NOs: 100-225, 2000-2116, or 4000-4251 and a second nucleic acid encoding a Staphylococcus lugdunensis (SluCas9); or
g. a first nucleic acid encoding a pair of guide RNAs comprising a first and second guide RNA selected from any one of the following pairs of guide RNAs: SEQ ID NOs: 1020 and 23; 1023 and 23; 1023 and 1037; 1024 and 1055; 1025 and 23; 1025 and 1055; 1026 and 23; 1028 and 1055; 1029 and 1055; 1029 and 1037; 1031 and 1037; 1032 and 1037; 101029 and 1027; 1037 and 1048; 1037 and 1051; 1037 and 1053; 20 and 23; 1038 and 23; 21 and 23; 1040 and 23; 1042 and 1037; 1043 and 1037; 1044 and 1037; 1045 and 1037; 1046 and 1037; 24 and 1037; 1047 and 1055; or 1055 and 1022; and a second nucleic acid encoding a Staphylococcus aureus Cas9 (SaCas9); or
h. a first nucleic acid encoding a pair of guide RNAs comprising a first and second guide RNA selected from any one of the following pairs of guide RNAs: SEQ ID NOs: 170 and 179; 172 and 179; 179 and 183; 179 and 185; 179 and 187; 179 and 188; 179 and 189; 179 and 193; 179 and 195; 179 and 196; 179 and 197; 200 and 174; or 200 and 176; and a second nucleic acid encoding a Staphylococcus lugdunensis (SluCas9);
i. a first nucleic acid encoding a pair of guide RNAs comprising a first and second guide RNA selected from any one of the following pairs of guide RNAs: SEQ ID NOs: 117 and 121; 117 and 122; 120 and 121; 120 and 123; 120 and 124; 120 and 125; 122 and 126; 122 and 123; 122 and 124; 122 and 125; or 122 and 126; and a second nucleic acid encoding a Staphylococcus lugdunensis (SluCas9); for targeting exon 44;
j. a first nucleic acid encoding a pair of guide RNAs comprising a first and second guide RNA selected from any one of the following pairs of guide RNAs: 155 and 156; 155 and 158; 155 and 162; 155 and 163; 162 and 157; 162 and 159; 162 and 164; 162 and 166; or 162 and 167; and a second nucleic acid encoding a Staphylococcus lugdunensis (SluCas9); for targeting exon 50;
k. a first nucleic acid encoding a pair of guide RNAs comprising a first and second guide RNA selected from any one of the following pairs of guide RNAs: SEQ ID NOs: 211 and 223; 211 and 225; 214 and 224; 216 and 223; 216 and 225; 220 and 224; 204 and 223; 223 and 224; or 204 and 225; and a second nucleic acid encoding a Staphylococcus lugdunensis (SluCas9); for targeting exon 53;
l. a first nucleic acid encoding a pair of guide RNAs comprising a first and second guide RNA selected from any one of the following pairs of guide RNAs: SEQ ID NOs: 1068 and 32; 1069 and 32; 1070 and 1075; 1071 and 32; 29 and 1075; 1072 and 27; 1072 and 28; 1072 and 32; 1072 and 33; 1073 and 1076; 1073 and 35; 221 and 1077; 1074 and 27; 1074 and 28; 1074 and 33; 32 and 1077; 1075 and 1076; 1075 and 35; 1076 and 26; or 35 and 26; and a second nucleic acid encoding a Staphylococcus aureus Cas9 (SaCas9); for targeting exon 53;
m. a first nucleic acid encoding a pair of guide RNAs comprising a first and second guide RNA selected from any one of the following pairs of guide RNAs: SEQ ID NOs: 148 and 134; 149 and 135; 150 and 135; 131 and 136; 151 and 136; 139 and 131; 139 and 151; 140 and 131; 140 and 151; 141 and 148; 144 and 149; 144 and 150; 145 and 131; 145 and 151; 146 and 148; 134 and 148; 135 and 149; 135 and 150; 136 and 131; 136 and 151; 131 and 139; 151 and 139; 131 and 140; 151 and 140; 148 and 141; 149 and 144; 150 and 144; 131 and 145; 151 and 145; and 148 and 146; and a second nucleic acid encoding a Staphylococcus lugdunensis (SluCas9); or
n. a first nucleic acid encoding a pair of guide RNAs comprising a first and second guide RNA selected from any one of the following pairs of guide RNAs: SEQ ID NOs: 10 and 15; 10 and 16; 12 and 16; 1001 and 1005; 1001 and 15; 1001 and 16; 1003 and 1005; 16 and 1003; 12 and 1010; 12 and 1012; 12 and 1013; 10 and 1016; 1017 and 1005; 1017 and 16; 1018 and 16; 15 and 10; 16 and 10; 16 and 12; 1005 and 1001; 15 and 1001; 16 and 1001; 1005 and 1003; 1003 and 16; 1010 and 12; 1012 and 12; 1013 and 12; 1016 and 10; 1005 and 1017; 16 and 1017; and 16 and 1018; and a second nucleic acid encoding a Staphylococcus aureus Cas9 (SaCas9).

21. A method comprising (a) administering to a subject in need thereof an agent that blocks LDL binding to a low-density lipoprotein receptor (LDLR) and concurrently or sequentially (b) administering an LNP or lipoplex comprising a payload to the subject, wherein the agent reduces off-target delivery of the LNP or lipoplex to the liver.

22. A method of increasing the percentage of payload delivered to a non-liver target in a subject, comprising (a) a pre-conditioning step comprising administering to the subject a composition comprising an agent that blocks LDL binding to a low-density lipoprotein receptor (LDLR) in the liver, and then (b) administering an LNP or lipoplex and a payload to the subject.

23. The method of any one of claims 21-22, wherein step (a) comprises administering to the subject the composition of any one of claims 1, and 6-20.

24. A method of decreasing liver tropism of a payload administered in an LNP or lipoplex in a subject comprising (a) administering to the subject a composition of any one of claims 1, and 6-20, and then (b) administering an LNP or lipoplex and a payload to the subject.

25. The method of any of claims 21-24, wherein administering to the subject a composition comprising an agent that blocks LDL binding to a low-density lipoprotein receptor (LDLR) in the liver temporarily blocks the delivery molecule from interacting with the LDLR in the liver.

26. The method of any of claims 21-25, wherein administering to the subject the composition and/or agent that blocks LDL binding to a low-density lipoprotein receptor (LDLR) in the liver occurs about 2 days, about 3 days, about 4 days, about 5 days, about 6 days, about 7 days, about 8 days, about 9 days, about 10 days, about 11 days, about 12 days, about 13 days, about 14 days, about 15 days, about 16, days, about 17 days, about 18 days, about 19 days, about 20 days, or about 21 days prior to administering the LNP or lipoplex, and payload.

27. The method of any one of claims 21-25, wherein administering to the subject the composition and/or agent that blocks LDL binding to a low-density lipoprotein receptor (LDLR) in the liver occurs about 1 day, about 2 days, about 3 days, about 4 days, about 5 days, about 6 days, about 7 days prior to administering the LNP or lipoplex and payload.

28. The method of any of claims 21-25, wherein administering to the subject the composition and/or agent that blocks LDL binding to a low-density lipoprotein receptor (LDLR) in the liver occurs about 8 days, about 9 days, about 10 days, about 11 days, about 12 days, about 13 days, or about 14 days prior to administering the LNP or lipoplex and payload.

29. The method of any of claims 21-25 wherein administering to the subject the composition of any one of claims 1, and 6-20 immediately precedes administering the LNP or lipoplex and payload.

30. The method of any of claims 21-25, wherein the composition of any one of claims 1, and 6-20 and the LNP or lipoplex and payload are co-administered.

31. The method of any of claims 21-30, wherein the delivery molecule is a lipid nanoparticle (LNP).

32. The method of any of claims 21-31, wherein the payload is a component of a CRISPR/Cas system or a nucleic acid encoding one or more components thereof, a biologic, or a small molecule, optionally wherein the component of a CRISPR/Cas system comprises a nucleic acid encoding one or more guide RNAs, one or more scaffolds, and/or one or more endonucleases.

33. The method of claim 32, wherein the component of a CRISPR/Cas system comprises a nucleic acid encoding one or more guide RNAs and a Cas9, wherein the nucleic acid molecule comprises:
a. a first nucleic acid encoding one or more guide RNAs selected from any one of SEQ ID NOs: 1-35, 1000-1078, or 3000-3069 and a second nucleic acid encoding a Staphylococcus aureus Cas9 (SaCas9); or
b. a first nucleic acid encoding one or more guide RNAs selected from any one of SEQ ID NOs: 100-225, 2000-2116, or 4000-4251 and a second nucleic acid encoding a Staphylococcus lugdunensis (SluCas9); or
c. a first nucleic acid encoding one or more guide RNAs comprising at least 20 contiguous nucleotides of a guide RNA selected from any one of SEQ ID NOs: 1-35, 1000-1078, or 3000-3069 and a second nucleic acid encoding a Staphylococcus aureus Cas9 (SaCas9); or
d. a first nucleic acid encoding one or more guide RNAs comprising at least 20 contiguous nucleotides of a guide RNA selected from any one of SEQ ID NOs: 100-225, 2000-2116, or 4000-4251 and a second nucleic acid encoding a Staphylococcus lugdunensis (SluCas9); or
e. a first nucleic acid encoding one or more guide RNAs that is at least 90% identical to any one of SEQ ID NOs: 1-35, 1000-1078, or 3000-3069 and a second nucleic acid encoding a Staphylococcus aureus Cas9 (SaCas9); or
f. a first nucleic acid encoding one or more guide RNAs that is at least 90% identical to any one of SEQ ID NOs: 100-225, 2000-2116, or 4000-4251 and a second nucleic acid encoding a Staphylococcus lugdunensis (SluCas9); or
g. a first nucleic acid encoding a pair of guide RNAs comprising a first and second guide RNA selected from any one of the following pairs of guide RNAs: SEQ ID NOs: 1020 and 23; 1023 and 23; 1023 and 1037; 1024 and 1055; 1025 and 23; 1025 and 1055; 1026 and 23; 1028 and 1055; 1029 and 1055; 1029 and 1037; 1031 and 1037; 1032 and 1037; 101029 and 1027; 1037 and 1048; 1037 and 1051; 1037 and 1053; 20 and 23; 1038 and 23; 21 and 23; 1040 and 23; 1042 and 1037; 1043 and 1037; 1044 and 1037; 1045 and 1037; 1046 and 1037; 24 and 1037; 1047 and 1055; or 1055 and 1022; and a second nucleic acid encoding a Staphylococcus aureus Cas9 (SaCas9); or
h. a first nucleic acid encoding a pair of guide RNAs comprising a first and second guide RNA selected from any one of the following pairs of guide RNAs: SEQ ID NOs: 170 and 179; 172 and 179; 179 and 183; 179 and 185; 179 and 187; 179 and 188; 179 and 189; 179 and 193; 179 and 195; 179 and 196; 179 and 197; 200 and 174; or 200 and 176; and a second nucleic acid encoding a Staphylococcus lugdunensis (SluCas9);
i. a first nucleic acid encoding a pair of guide RNAs comprising a first and second guide RNA selected from any one of the following pairs of guide RNAs: SEQ ID NOs: 117 and 121; 117 and 122; 120 and 121; 120 and 123; 120 and 124; 120 and 125; 122 and 126; 122 and 123; 122 and 124; 122 and 125; or 122 and 126; and a second nucleic acid encoding a Staphylococcus lugdunensis (SluCas9); for targeting exon 44;
j. a first nucleic acid encoding a pair of guide RNAs comprising a first and second guide RNA selected from any one of the following pairs of guide RNAs: 155 and 156; 155 and 158; 155 and 162; 155 and 163; 162 and 157; 162 and 159; 162 and 164; 162 and 166; or 162 and 167; and a second nucleic acid encoding a Staphylococcus lugdunensis (SluCas9); for targeting exon 50;
k. a first nucleic acid encoding a pair of guide RNAs comprising a first and second guide RNA selected from any one of the following pairs of guide RNAs: SEQ ID NOs: 211 and 223; 211 and 225; 214 and 224; 216 and 223; 216 and 225; 220 and 224; 204 and 223; 223 and 224; or 204 and 225; and a second nucleic acid encoding a Staphylococcus lugdunensis (SluCas9); for targeting exon 53;
l. a first nucleic acid encoding a pair of guide RNAs comprising a first and second guide RNA selected from any one of the following pairs of guide RNAs: SEQ ID NOs: 1068 and 32; 1069 and 32; 1070 and 1075; 1071 and 32; 29 and 1075; 1072 and 27; 1072 and 28; 1072 and 32; 1072 and 33; 1073 and 1076; 1073 and 35; 221 and 1077; 1074 and 27; 1074 and 28; 1074 and 33; 32 and 1077; 1075 and 1076; 1075 and 35; 1076 and 26; or 35 and 26; and a second nucleic acid encoding a Staphylococcus aureus Cas9 (SaCas9); for targeting exon 53;
m. a first nucleic acid encoding a pair of guide RNAs comprising a first and second guide RNA selected from any one of the following pairs of guide RNAs: SEQ ID NOs: 148 and 134; 149 and 135; 150 and 135; 131 and 136; 151 and 136; 139 and 131; 139 and 151; 140 and 131; 140 and 151; 141 and 148; 144 and 149; 144 and 150; 145 and 131; 145 and 151; 146 and 148; 134 and 148; 135 and 149; 135 and 150; 136 and 131; 136 and 151; 131 and 139; 151 and 139; 131 and 140; 151 and 140; 148 and 141; 149 and 144; 150 and 144; 131 and 145; 151 and 145; and 148 and 146; and a second nucleic acid encoding a Staphylococcus lugdunensis (SluCas9); or
n. a first nucleic acid encoding a pair of guide RNAs comprising a first and second guide RNA selected from any one of the following pairs of guide RNAs: SEQ ID NOs: 10 and 15; 10 and 16; 12 and 16; 1001 and 1005; 1001 and 15; 1001 and 16; 1003 and 1005; 16 and 1003; 12 and 1010; 12 and 1012; 12 and 1013; 10 and 1016; 1017 and 1005; 1017 and 16; 1018 and 16; 15 and 10; 16 and 10; 16 and 12; 1005 and 1001; 15 and 1001; 16 and 1001; 1005 and 1003; 1003 and 16; 1010 and 12; 1012 and 12; 1013 and 12; 1016 and 10; 1005 and 1017; 16 and 1017; and 16 and 1018; and a second nucleic acid encoding a Staphylococcus aureus Cas9 (SaCas9).

34. The method of any one of claims 21-33, wherein the payload is encapsulated within a lipid nanoparticle (LNP).

35. The method of any of claims 21-34, wherein the method comprises co-administering other drugs that facilitate increased uptake of the agent in the liver.

36. The method of any of any of claims 21-35 wherein the blocking of LDL to a low-density lipoprotein receptor (LDLR) in the liver in step (a) is not temporary.

37. The method of any one of claims 21-36, wherein the payload is within an LNP, and the LNP targets the brain; spinal cord; eye; retina; bone; cardiac muscle, skeletal muscle, smooth muscle; lung; pancreas; heart; and/or kidney.

38. The method of any one of claims 21-37, wherein administering the composition in step (a) increases the percentage of payload delivered to a non-liver target.

39. The method of any one of claims 21-38, wherein the method results in at least a 10%, 30%, 50%, 75%, 100%, 125%, 150%, 200%, 250%, 300%, 350%, 400%, 450%, 500%, 600%, 700%, 800%, 900%, or 1000% increase of payload in a non-liver target as compared to the payload in the corresponding tissue of a control subject that received the payload but did not receive the agent that blocks LDL binding to a low-density lipoprotein receptor (LDLR) in the liver.

40. The method of claim 39, wherein the method results in at least a 10%, 30%, 50%, 75%, 100%, 125%, 150%, 200%, 250%, 300%, 350%, 400%, 450%, 500%, 600%, 700%, 800%, 900%, or 1000% increase of payload in skeletal muscle as compared to the payload in the corresponding muscle of a control subject that received the payload but did not receive the agent that blocks LDL binding to a low-density lipoprotein receptor (LDLR) in the liver.

41. The method of any one of claims 21-40, wherein the agent comprises an RNAi.

42. The method of claim 41, wherein the RNAi is a small-interfering RNA (siRNA), an antisense oligonucleotide (ASO), microRNA (miRNA), double-stranded RNA (dsRNA), short hairpin RNA (shRNA) or an expression cassette encoding an RNA.

43. The method of any one of claims 21-40, wherein the agent comprises an siRNA.

44. The method of claim 43, wherein the siRNA binds to a nucleic acid comprising the nucleotide sequence of any one of SEQ ID NOs: 350-352, or the reverse complement thereof.

45. The method of claim 43, wherein the siRNA comprises at least 13, at least 14, at least 15, at least 16, at least 17, at least 18, at least 19, at least 20, or at least 21 consecutive nucleic acids of any one of the nucleic acid sequences in Table 3B.

46. The method of claim 43, wherein the siRNA is at least 80%, at least 85%, at least 90%, or at least 95% identical to any one of the nucleic acid sequences in Table 3B.

47. The method of any one of claims 21-40, wherein the agent comprises an antisense oligonucleotide (ASO).

48. The method of any of claims 21-47, wherein the subject is a human subject.

49. The method of any one of claims 21-48, wherein the agent is administered intravenously or subcutaneously.

50. A composition comprising an siRNA comprising a nucleotide sequence selected from SEQ ID NOs: 4310-9964 or 9975-15629.
